(19) United States
(12) Patent Application Publication
(10) Pub. No.: US 2005/0129683 A1
(43) Pub. Date: Jun. 16, 2005

(54) Human testis expressed patched like protein

(76) Inventor: Jian Zhang, San Mateo, CA (US)

Correspondence Address: AMERSHAM BIOSCIENCES;PATENT DEPARTMENT, 800 CENTENNIAL AVENUE, PISCATAWAY, NJ, 08855, US

(21) Appl. No.: 10/890,776

(22) Filed: Jul. 14, 2004

Related U.S. Application Data
(63) Continuation of application No. 10/060,756, filed on Jan. 30, 2002.
Application No. 10/060,756 is a continuation-in-part of application No. PCT/US01/00663, filed on Jan. 30, 2001.
Application No. 10/060,756 is a continuation-in-part of application No. PCT/US01/00664, filed on Jan. 30, 2001.
Application No. 10/060,756 is a continuation-in-part of application No. PCT/US01/00665, filed on Jan. 30, 2001.
Application No. 10/060,756 is a continuation-in-part of application No. PCT/US01/00667, filed on Jan. 30, 2001.
Application No. 10/060,756 is a continuation-in-part of application No. PCT/US01/00668, filed on Jan. 30, 2001.
Application No. 10/060,756 is a continuation-in-part of application No. PCT/US01/00669, filed on Jan. 30, 2001.
Application No. 10/060,756 is a continuation-in-part of application No. 09/864,761, filed on May 23, 2001.
(60) Provisional application No. 60/327,898, filed on Oct. 9, 2001.

(51) Int. Cl. C12Q 1/68; G01N 33/53; G01N 33/567; A01K 67/00; A61K 39/395; C07H 21/04

(52) U.S. Cl. 424/143.1; 435/69.1; 435/320.1; 435/325; 530/350; 536/23.5; 435/6; 435/7.2; 530/388.22; 800/8

(57) ABSTRACT

The invention provides isolated nucleic acids that encode HTPL, including two isoforms, and fragments thereof, vectors for propagating and expressing HTPL nucleic acids, host cells comprising the nucleic acids and vectors of the present invention, proteins, protein fragments, and protein fusions of the novel HTPL isoforms, and antibodies thereto. The invention further provides transgenic cells and non-human organisms comprising human HTPL nucleic acids, and transgenic cells and non-human organisms with targeted disruption of the endogenous orthologue of the human HTPL gene. The invention further provides pharmaceutical formulations of the nucleic acids, proteins, and antibodies of the present invention, and diagnostic, investigational, and therapeutic methods based on the HTPL nucleic acids, proteins, and antibodies of the present invention.

### CROSS REFERENCE TO RELATED APPLICATIONS

[0001] This application claims priority under 35 U.S.C. § 365(c) to international patent application no. PCT/US01/00663, PCT/US01/00664, PCT/US01/00665, PCT/US01/00667, PCT/US01/00668 and PCT/US01/00669, all filed Jan. 30, 2001; claims priority under 35 U.S.C. § 120 to commonly owned and copending U.S. application Ser. No. 09/864,761, filed May 23, 2001; claims priority to U.S. provisional application Ser. No: 60/327,898, filed Oct. 9, 2001; the disclosures of which are incorporated herein by reference in their entireties.

### REFERENCE TO SEQUENCE LISTING SUBMITTED ON COMPACT DISC

[0002] The present application includes a Sequence Listing filed on a single CD-R disc, provided in duplicate, containing a single file named pto_PB0177.txt, having 703 kilobytes, last modified on Jan. 17, 2002 and recorded Jan. 24, 2002. The Sequence Listing contained in said file on said disc is incorporated herein by reference in its entirety.

### FIELD OF THE INVENTION

[0003] The present invention relates to novel human testis expressed patched like protein, including two isoforms. More specifically, the invention provides isolated nucleic acid molecules encoding human testis expressed patched like protein, fragments thereof, vectors and host cells comprising isolated nucleic acid molecules encoding human testis expressed patched like protein, human testis expressed patched like protein polypeptides, antibodies, transgenic cells and non-human organisms, and diagnostic, therapeutic, and investigational methods of using the same.

### BACKGROUND OF THE INVENTION

[0004] Sterols are key components of all cell membranes in eukaryotes. Cholesterol, in particular, plays an important role in regulating the properties of cell membranes. It rigidities the fluid membrane by occupying the spaces between the saturated hydrocarbon chains of the sphingolipids, thus reducing passive permeability and increasing the mechanical durability of the lipid bilayer. Simons and Ikonens, Science 290:1721-1726 (2000). Cholesterol is also thought to increase post-Golgi protein sorting by regulating the thickness of the lipid bilayer. Simons and Ikonens, Science 290:1721-1726 (2000). It also functions in lipid raft assembly and function. These dynamic assemblies are involved in sorting and distributing lipids and proteins to the cell surface, where they play an important role in signal transduction and in generating cell surface polarity. Simons and Ikones, Nature 387:569-572 (1997). It is now widely accepted that “not only the total cellular level of cholesterol but also its distribution between membranes and within a given membrane are tightly regulated”. Simons and Ikonens, Science 290:1721-1726 (2000).

[0005] The dynamic cholesterol balance between different cellular compartments is achieved through several important proteins. These include the sterol-regulated enzyme 3-hydroxy-3-methylglutaryl (HMG) CoA reductase, as well as SREBP cleavage activating protein (SCAP), a membrane-bound glycoprotein that regulates the proteolytic activation of sterol regulatory element binding proteins (SREBPs). Hua et al., Cell 87:415-426 (1996); Nohturfft et al., Proc. Natl. Acad. Sci. USA 95:12848-12853 (1998). A common domain has been identified in these two proteins and named sterol-sensing domain (SSD). Similar sequences have been found in several other proteins, suggesting that these proteins also play a role in cholesterol-related cellular functions. These proteins include the Niemann Pick-type C1 protein necessary for export of cholesterol from lysosomes (Stacie et al., Science 277:232-235 (1997)); Patched, a receptor for Hedgehog (Tabin and McMahon, Trends Cell Biol. 7:442-446 (1997)); a Patched-related protein implicated in the hereditary renal cell carcinoma (TRC8; Gemmill et al., Proc. Natl. Acad. Sci. USA 95:9572-9577 (1998)); and Dispatched, which is critical to the release of hedgehog (Burke, et al., Cell 99:803-815 (1999)). Sterol-sensing domain is indispensable for functions of the above proteins. For example, mutations in SSD of SCAP result in the disruption of cholesterol homeostasis. Nohturfft et al., Proc. Natl. Acad. Sci. USA 95:12848-12853 (1998). Recent evidence suggests that the sterol-sensing domain in Patched is critical in regulating vesicular trafficking of its receptor partner Smoothened. Strutt et al., Curr. Biol. 11:608-613 (2001); Martin et al., Curr. Biol. 11:601-607 (2001).

[0006] Hedgehog, the Patched ligand, is the only protein known to have a covalently attached cholesterol moiety. Porter et al., Science 274:255-259 (1996). Three hedgehog homologues have been identified in mammals: sonic hedgehog, Indian hedgehog, and desert hedgehog. Tabin and McMahon, Trends Cell Biol. 7:442-446 (1997). Function of the hedgehog signaling pathway has been studied extensively. It has been shown that Patched is a twelve transmembrane protein and forms complex with Smoothened, a seven transmembrane protein, which acts as the signaling component of the pathway. Without hedgehog binding, Patched inhibits Smoothened signaling thus ensures that the signaling is tightly controlled by ligand regulation. Kalderon, Cell 103:371-374 (2000). Mutations in sonic hedgehog, Patched, and smoothened have all been shown to cause tumors in skin and brain, among other tissues. Wicking et al., Oncogene 18:7844-7851 (1999). For example, mutations in the Patched gene result in basal cell carcinoma thus Patched is a tumor suppressor gene. Wicking et al., Oncogene 18:7844-7851 (1999). Desert hedgehog is expressed in testis and has been suggested to be the ligand of Patched-2. Carpenter et al., Proc. Natl. Acad. Sci. USA 95:13630-13634 (1998). Although Patched-2 has yet to be demonstrated as a tumor suppressor gene, its involvement in germ cell development suggests that its dysfunction may cause malformation of germ cells.

[0007] Given the fact that Patched is a transmembrane protein functioning in the hedgehog signaling pathway, mutations of which cause a variety of tumors, it has potential therapeutic as well as diagnostic roles in cancer. There is a need to identify and to characterize additional Patched like protein.

### SUMMARY OF THE INVENTION

[0008] The present invention solves these and other needs in the art by providing isolated nucleic acids that encode human testis expressed Patched like protein (HTPL), including two isoforms (HTPL-L for the long form and HTPL-S for the short form), and fragments thereof.

[0009] In other aspects, the invention provides vectors for propagating and expressing the nucleic acids of the present invention, host cells comprising the nucleic acids and vectors of the present invention, proteins, protein fragments, and protein fusions of HTPL, and antibodies thereto.

[0010] The invention further provides pharmaceutical formulations of the nucleic acids, proteins, and antibodies of the present invention.

[0011] In other aspects, the invention provides transgenic cells and non-human organisms comprising HTPL nucleic acids, and transgenic cells and non-human organisms with targeted disruption of the endogenous orthologue of the HTPL.

[0012] The invention additionally provides diagnostic, investigational, and therapeutic methods based on the HTPL nucleic acids, proteins, and antibodies of the present invention.

### BRIEF DESCRIPTION OF THE DRAWINGS

[0013] The above and other objects and advantages of the present invention will be apparent upon consideration of the following detailed description taken in conjunction with the accompanying drawings, in which like characters refer to like parts throughout, and in which:

[0014] FIG. 1(A) schematizes the protein domain structure of HTPL-L and HTPL-S, and FIG. 1(B) shows the alignment of the Patched motif of HTPL-L with that of other Patched domain containing proteins;

[0015] FIG. 2 is a map showing the genomic structure of HTPL encoded at chromosome 10p12.1;

[0016] FIG. 3 presents the nucleotide and predicted amino acid sequences of HTPL-L;

[0017] FIG. 4 presents the nucleotide and predicted amino acid sequences of HTPL-S; and

[0018] FIG. 5 presents the expression analysis of HTPL by RT-PCR.

### DETAILED DESCRIPTION OF THE INVENTION

[0019] Mining the sequence of the human genome for novel human genes, the present inventors have identified HTPL, including two isoforms, a testis expressed Patched like transmembrane tumor suppressor involved in germ cell development.

[0020] The newly isolated HTPL gene has two isoforms, with a few single base pair differences between the two (FIG. 3 and FIG. 4). One of the single base pair changes in HTPL-S introduces a premature stop codon in HTPL-S(S for short) compared to HTPL-L (L for long). HTPL shares an overall structural organization with the Patched protein. The shared structural features strongly imply that HTPL plays a role similar to that of Patched, in the hedgehog signaling pathway, and is a potential tumor suppressor.

[0021] Like Patched, HTPL-L contains a Patched domain (http://pfam.wustl.edu/hmmsearch.shtml), a Sterol-sensing domain (SSD, http://motif.genome.ad.jp/) and twelve transmembrane domains (http://smart.embl-heidelberg.de/smart/show_motifs.pl). The Patched domain in HTPL-L covers amino acid sequences 166-952 of HTPL-L. The SSD domain in HTPL-L covers amino acid sequences 383-540 of HTPL-L. The presence of these domains in HTPL-L suggest that HTPL-L, like Patched and other Patched domain containing proteins, is involved in the Hedgehog signaling pathway (see background section). Because of the presence of the premature stop codon, HTPL-S contains a partial Patched domain, a complete Sterol-sensing motif and seven transmembrane domains. The presence of these domains in HTPL-S suggests that HTPL-S is also involved in the Hedgehog signaling pathway.

[0022] Other signatures of the newly isolated HTPL proteins were identified by searching the PROSITE database (http://www.expasy.ch/tools/scnpsitl.html), and the list below is for both HTPL-L and HTPL-S unless specified otherwise. These include seven N-glycosylation sites (192-195, 275-278, 279-282, 530-533, 678-681, 692-695 and 737-740), one cAMP- and cGMP-dependent protein kinase phosphorylation site (201-204), seven protein kinase C phosphorylation sites (194-196, 200-202, 508-510, 561-563, 662-664, 746-748, and 759-761; plus one for HTPL-L at 800-802), twelve Casein kinase II phosphorylation sites (19-22, 36-39, 62-65, 79-82, 190-193, 215-218, 219-222, 225-228, 230-233, 572-575, 597-600, and 740-743), two tyrosine kinase phosphorylation site (329-335, and 681-688; plus one for HTPL-L at 887-893), four N-myristoylation sites (307-312, 418-4223, 504-509, and 535-540; plus one for HTPL-L at 935-940), and a single amidation site at 541-544.

[0023] FIG. 2 shows the genomic organization of HTPL.

[0024] At the top is shown the bacterial artificial chromosome (BAC), with GenBank accession number (AC005875.2), that span the HTPL locus. The genome-derived single-exon probe first used to demonstrate expression from this locus is shown below the BACs and labeled “500”. The 500 bp probe includes sequence drawn solely from exon four.

[0025] As shown in FIG. 2, two HTPL isoforms have been identified. Both isoforms contain four exons, with a few single base pair differences between them (FIG. 3 and FIG. 4). The longer form, HTPL-L, encodes a protein of 954 amino acids that has a predicted molecular weight, prior to any post-translational modification, of 107.6 kD. One of the single base pair changes in HTPL-S introduces a premature stop codon at position 2379 of the HTPL-S cDNA. HTPL-S, therefore, encodes a shorter protein of 767 amino acids that has a predicted molecular weight, prior to any post-translational modification, of 86.9 kD. Both cDNA clones appear full lengths, with the open reading frame starting with a methionine and terminating with a stop codon.

[0026] As further discussed in the examples herein, expression of HTPL was assessed using hybridization to genome-derived single exon microarrays. Microarray analysis of the fourth exon showed low level expression in all tissues tested, including adrenal, adult liver, bone marrow, brain, fetal liver, kidney, lung, placenta and prostate. This was confirmed by RT-PCR. RT-PCR also detected strong expression in testis and weak expression in skeletal muscle and colon (see Example 3).

[0027] As more fully described below, the present invention provides isolated nucleic acids that encode HTPL, including two isoforms, and fragments thereof. The invention further provides vectors for propagation and expression of the nucleic acids of the present invention, host cells comprising the nucleic acids and vectors of the present invention, proteins, protein fragments, and protein fusions of the present invention, and antibodies specific for all or any one of the isoforms. The invention provides pharmaceutical formulations of the nucleic acids, proteins, and antibodies of the present invention. The invention further provides transgenic cells and non-human organisms comprising human HTPL nucleic acids, and transgenic cells and non-human organisms with targeted disruption of the endogenous orthologue of the human HTPL. The invention additionally provides diagnostic, investigational, and therapeutic methods based on the HTPL nucleic acids, proteins, and antibodies of the present invention.

[0028] Definitions

[0029] Unless defined otherwise, all technical and scientific terms used herein have the meaning commonly understood by one of ordinary skill in the art to which this invention belongs.

[0030] As used herein, “nucleic acid” (synonymously, “polynucleotide”) includes polynucleotides having natural nucleotides in native 5′-3′ phosphodiester linkage—e.g., DNA or RNA—as well as polynucleotides that have nonnatural nucleotide analogues, normative internucleoside bonds, or both, so long as the nonnatural polynucleotide is capable of sequence-discriminating basepairing under experimentally desired conditions. Unless otherwise specified, the term “nucleic acid” includes any topological conformation; the term thus explicitly comprehends single-stranded, double-stranded, partially duplexed, triplexed, hairpinned, circular, and padlocked conformations.

[0031] As used herein, an “isolated nucleic acid” is a nucleic acid molecule that exists in a physical form that is nonidentical to any nucleic acid molecule of identical sequence as found in nature; “isolated” does not require, although it does not prohibit, that the nucleic acid so described has itself been physically removed from its native environment.

[0032] For example, a nucleic acid can be said to be “isolated” when it includes nucleotides and/or internucleoside bonds not found in nature. When instead composed of natural nucleosides in phosphodiester linkage, a nucleic acid can be said to be “isolated” when it exists at a purity not found in nature, where purity can be adjudged with respect to the presence of nucleic acids of other sequence, with respect to the presence of proteins, with respect to the presence of lipids, or with respect the presence of any other component of a biological cell, or when the nucleic acid lacks sequence that flanks an otherwise identical sequence in an organism's genome, or when the nucleic acid possesses sequence not identically present in nature.

[0033] As so defined, “isolated nucleic acid” includes nucleic acids integrated into a host cell chromosome at a heterologous site, recombinant fusions of a native fragment to a heterologous sequence, recombinant vectors present as episomes or as integrated into a host cell chromosome.

[0034] As used herein, an isolated nucleic acid “encodes” a reference polypeptide when at least a portion of the nucleic acid, or its complement, can be directly translated to provide the amino acid sequence of the reference polypeptide, or when the isolated nucleic acid can be used, alone or as part of an expression vector, to express the reference polypeptide in vitro, in a prokaryotic host cell, or in a eukaryotic host cell.

[0035] As used herein, the term “exon” refers to a nucleic acid sequence found in genomic DNA that is bioinformatically predicted and/or experimentally confirmed to contribute contiguous sequence to a mature mRNA transcript.

[0036] As used herein, the phrase “open reading frame” and the equivalent acronym “ORF” refer to that portion of a transcript-derived nucleic acid that can be translated in its entirety into a sequence of contiguous amino acids. As so defined, an ORF has length, measured in nucleotides, exactly divisible by 3. As so defined, an ORF need not encode the entirety of a natural protein.

[0037] As used herein, the phrase “ORF-encoded peptide” refers to the predicted or actual translation of an ORF.

[0038] As used herein, the phrase “degenerate variant” of a reference nucleic acid sequence intends all nucleic acid sequences that can be directly translated, using the standard genetic code, to provide an amino acid sequence identical to that translated from the reference nucleic acid sequence.

[0039] As used herein, the term “microarray” and the equivalent phrase “nucleic acid microarray” refer to a substrate-bound collection of plural nucleic acids, hybridization to each of the plurality of bound nucleic acids being separately detectable. The substrate can be solid or porous, planar or non-planar, unitary or distributed.

[0040] As so defined, the term “microarray” and phrase “nucleic acid microarray” include all the devices so called in Schena (ed.), DNA Microarrays: A Practical Approach (Practical Approach Series), Oxford University Press (1999) (ISBN: 0199637768); Nature Genet. 21(1)(suppl):1-60 (1999); and Schena (ed.), Microarray Biochip: Tools and Technology, Eaton Publishing Company/BioTechniques Books Division (2000) (ISBN: 1881299376), the disclosures of which are incorporated herein by reference in their entireties.

[0041] As so defined, the term “microarray” and phrase “nucleic acid microarray” also include substrate-bound collections of plural nucleic acids in which the plurality of nucleic acids are distributably disposed on a plurality of beads, rather than on a unitary planar substrate, as is described, inter alia, in Brenner et al., Proc. Natl. Acad. Sci. USA 97 (4):166501670 (2000), the disclosure of which is incorporated herein by reference in its entirety; in such case, the term “microarray” and phrase “nucleic acid microarray” refer to the plurality of beads in aggregate.

[0042] As used herein with respect to solution phase hybridization, the term “probe”, or equivalently, “nucleic acid probe” or “hybridization probe”, refers to an isolated nucleic acid of known sequence that is, or is intended to be, detectably labeled. As used herein with respect to a nucleic acid microarray, the term “probe” (or equivalently “nucleic acid probe” or “hybridization probe”) refers to the isolated nucleic acid that is, or is intended to be, bound to the substrate. In either such context, the term “target” refers to nucleic acid intended to be bound to probe by sequence complementarity.

[0043] As used herein, the expression “probe comprising SEQ ID NO:X”, and variants thereof, intends a nucleic acid probe, at least a portion of which probe has either (i) the sequence directly as given in the referenced SEQ ID NO:X, or (ii) a sequence complementary to the sequence as given in the referenced SEQ ID NO:X, the choice as between sequence directly as given and complement thereof dictated by the requirement that the probe be complementary to the desired target.

[0044] As used herein, the phrases “expression of a probe” and “expression of an isolated nucleic acid” and their linguistic equivalents intend that the probe or, (respectively, the isolated nucleic acid), or a probe (or, respectively, isolated nucleic acid) complementary in sequence thereto, can hybridize detectably under high stringency conditions to a sample of nucleic acids that derive from mRNA transcripts from a given source. For example, and by way of illustration only, expression of a probe in “liver” means that the probe can hybridize detectably under high stringency conditions to a sample of nucleic acids that derive from mRNA obtained from liver.

[0045] As used herein, “a single exon probe” comprises at least part of an exon (“reference exon”) and can hybridize detectably under high stringency conditions to transcript-derived nucleic acids that include the reference exon. The single exon probe will not, however, hybridize detectably under high stringency conditions to nucleic acids that lack the reference exon and that consist of one or more exons that are found adjacent to the reference exon in the genome.

[0046] For purposes herein, “high stringency conditions” are defined for solution phase hybridization as aqueous hybridization (i.e., free of formamide) in 6× SSC (where 20×SSC contains 3.0 M NaCl and 0.3 M sodium citrate), 1% SDS at 65° C. for at least 8 hours, followed by one or more washes in 0.2× SSC, 0.1% SDS at 65° C. “Moderate stringency conditions” are defined for solution phase hybridization as aqueous hybridization (i.e., free of formamide) in 6× SSC, 1% SDS at 65° C. for at least 8 hours, followed by one or more washes in 2×SSC, 0.1% SDS at room temperature.

[0047] For microarray-based hybridization, standard “high stringency conditions” are defined as hybridization in 50% formamide, 5× SSC, 0.2 μg/μl poly(dA), 0.2 μg/μl human cot1 DNA, and 0.5% SDS, in a humid oven at 42° C. overnight, followed by successive washes of the microarray in 1× SSC, 0.2% SDS at 55° C. for 5 minutes, and then 0.1× SSC, 0.2% SDS, at 55° C. for 20 minutes. For microarray-based hybridization, “moderate stringency conditions”, suitable for cross-hybridization to mRNA encoding structurally- and functionally-related proteins, are defined to be the same as those for high stringency conditions but with reduction in temperature for hybridization and washing to room temperature (approximately 25° C.).

[0048] As used herein, the terms “protein”, “polypeptide”, and “peptide” are used interchangeably to refer to a naturally-occurring or synthetic polymer of amino acid monomers (residues), irrespective of length, where amino acid monomer here includes naturally-occurring amino acids, naturally-occurring amino acid structural variants, and synthetic non-naturally occurring analogs that are capable of participating in peptide bonds. The terms “protein”, “polypeptide”, and “peptide” explicitly permits of post-translational and post-synthetic modifications, such as glycosylation.

[0049] The term “oligopeptide” herein denotes a protein, polypeptide, or peptide having 25 or fewer monomeric subunits.

[0050] The phrases “isolated protein”, “isolated polypeptide”, “isolated peptide” and “isolated oligopeptide” refer to a protein (or respectively to a polypeptide, peptide, or oligopeptide) that is nonidentical to any protein molecule of identical amino acid sequence as found in nature; “isolated” does not require, although it does not prohibit, that the protein so described has itself been physically removed from its native environment.

[0051] For example, a protein can be said to be “isolated” when it includes amino acid analogues or derivatives not found in nature, or includes linkages other than standard peptide bonds.

[0052] When instead composed entirely of natural amino acids linked by peptide bonds, a protein can be said to be “isolated” when it exists at a purity not found in nature—where purity can be adjudged with respect to the presence of proteins of other sequence, with respect to the presence of non-protein compounds, such as nucleic acids, lipids, or other components of a biological cell, or when it exists in a composition not found in nature, such as in a host cell that does not naturally express that protein.

[0053] A “purified protein” (equally, a purified polypeptide, peptide, or oligopeptide) is an isolated protein, as above described, present at a concentration of at least 95%, as measured on a weight basis with respect to total protein in a composition. A “substantially purified protein” (equally, a substantially purified polypeptide, peptide, or oligopeptide) is an isolated protein, as above described, present at a concentration of at least 70%, as measured on a weight basis with respect to total protein in a composition.

[0054] As used herein, the phrase “protein isoforms” refers to a plurality of proteins having nonidentical primary amino acid sequence but that share amino acid sequence encoded by at least one common exon.

[0055] As used herein, the phrase “alternative splicing” and its linguistic equivalents includes all types of RNA processing that lead to expression of plural protein isoforms from a single gene; accordingly, the phrase “splice variant(s)” and its linguistic equivalents embraces mRNAs transcribed from a given gene that, however processed, collectively encode plural protein isoforms. For example, and by way of illustration only, splice variants can include exon insertions, exon extensions, exon truncations, exon deletions, alternatives in the 5′ untranslated region (“5′UT”) and alternatives in the 3′ untranslated region (“3′UT”). Such 3′ alternatives include, for example, differences in the site of RNA transcript cleavage and site of poly(A) addition. See, e.g., Gautheret et al., Genome Res. 8:524-530 (1998).

[0056] As used herein, “orthologues” are separate occurrences of the same gene in multiple species. The separate occurrences have similar, albeit nonidentical, amino acid sequences, the degree of sequence similarity depending, in part, upon the evolutionary distance of the species from a common ancestor having the same gene.

[0057] As used herein, the term “paralogues” indicates separate occurrences of a gene in one species. The separate occurrences have similar, albeit nonidentical, amino acid sequences, the degree of sequence similarity depending, in part, upon the evolutionary distance from the gene duplication event giving rise to the separate occurrences.

[0058] As used herein, the term “homologues” is generic to “orthologues” and “paralogues”.

[0059] As used herein, the term “antibody” refers to a polypeptide, at least a portion of which is encoded by at least one immunoglobulin gene, or fragment thereof, and that can bind specifically to a desired target molecule. The term includes naturally-occurring forms, as well as fragments and derivatives.

[0060] Fragments within the scope of the term “antibody” include those produced by digestion with various proteases, those produced by chemical cleavage and/or chemical dissociation, and those produced recombinantly, so long as the fragment remains capable of specific binding to a target molecule. Among such fragments are Fab, Fab′, Fv, F(ab)′₂, and single chain Fv (scFv) fragments.

[0061] Derivatives within the scope of the term include antibodies (or fragments thereof) that have been modified in sequence, but remain capable of specific binding to a target molecule, including: interspecies chimeric and humanized antibodies; antibody fusions; heteromeric antibody complexes and antibody fusions, such as diabodies (bispecific antibodies), single-chain diabodies, and intrabodies (see, e.g., Marasco (ed.), Intracellular Antibodies: Research and Disease Applications, Springer-Verlag New York, Inc. (1998) (ISBN: 3540641513), the disclosure of which is incorporated herein by reference in its entirety).

[0062] As used herein, antibodies can be produced by any known technique, including Harvest from cell culture of native B lymphocytes, harvest from culture of hybridomas, recombinant expression-systems, and phage display.

[0063] As used herein, “antigen” refers to a ligand that can be bound by an antibody; an antigen need not itself be immunogenic. The portions of the antigen that make contact with the antibody are denominated “epitopes”.

[0064] “Specific binding” refers to the ability of two molecular species concurrently present in a heterogeneous (inhomogeneous) sample to bind to one another in preference to binding to other molecular species in the sample. Typically, a specific binding interaction will discriminate over adventitious binding interactions in the reaction by at least two-fold, more typically by at least 10-fold, often at least 100-fold; when used to detect analyte, specific binding is sufficiently discriminatory when determinative of the presence of the analyte in a heterogeneous (inhomogeneous) sample. Typically, the affinity or avidity of a specific binding reaction is least about 10⁻⁷ M, with specific binding reactions of greater specificity typically having affinity or avidity of at least 10⁻⁸ M to at least about 10⁻⁹ M.

[0065] As used herein, “molecular binding partners”—and equivalently, “specific binding partners”—refer to pairs of molecules, typically pairs of biomolecules, that exhibit specific binding. Nonlimiting examples are receptor and ligand, antibody and antigen, and biotin to any of avidin, streptavidin, neutrAvidin and captAvidin.

[0066] The term “antisense”, as used herein, refers to a nucleic acid molecule sufficiently complementary in sequence, and sufficiently long in that complementary sequence, as to hybridize under intracellular conditions to (i) a target mRNA transcript or (ii) the genomic DNA strand complementary to that transcribed to produce the target mRNA transcript.

[0067] The term “portion”, as used with respect to nucleic acids, proteins, and antibodies, is synonymous with “fragment”.

[0068] Nucleic Acid Molecules

[0069] In a first aspect, the invention provides isolated nucleic acids that encode HTPL, including two isoforms, variants having at least 65% sequence identity thereto, degenerate variants thereof, variants that encode HTPL proteins having conservative or moderately conservative substitutions, cross-hybridizing nucleic acids, and fragments thereof.

[0070] FIG. 3 and FIG. 4 presents the nucleotide sequence of the HTPL-L and HTPL-S cDNA clones, with predicted amino acid translation; the sequences are further presented in the Sequence Listing, incorporated herein by reference in its entirety, in SEQ ID NOs: 1 (full length nucleotide sequence of human HTPL-L cDNA), 3 (full length amino acid coding sequence of human HTPL-L), 4 (full length nucleotide sequence of human HTPL-S cDNA), and 6 (full length amino acid coding sequence of human HTPL-S).

[0071] Unless otherwise indicated, each nucleotide sequence is set forth herein as a sequence of deoxyribonucleotides. It is intended, however, that the given sequence be interpreted as would be appropriate to the polynucleotide composition: for example, if the isolated nucleic acid is composed of RNA, the given sequence intends ribonucleotides, with uridine substituted for thymidine.

[0072] Unless otherwise indicated, nucleotide sequences of the isolated nucleic acids of the present invention were determined by sequencing a DNA molecule that had resulted, directly or indirectly, from at least one enzymatic polymerization reaction (e.g., reverse transcription and/or polymerase chain reaction) using an automated sequencer (such as the MegaBACE™ 1000, Amersham Biosciences, Sunnyvale, Calif., USA), or by reliance upon such sequence or upon genomic sequence prior-accessioned into a public database. Unless otherwise indicated, all amino acid sequences of the polypeptides of the present invention were predicted by translation from the nucleic acid sequences so determined.

[0073] As a consequence, any nucleic acid sequence presented herein may contain errors introduced by erroneous incorporation of nucleotides during polymerization, by erroneous base calling by the automated sequencer (although such sequencing errors have been minimized for the nucleic acids directly determined herein, unless otherwise indicated, by the sequencing of each of the complementary strands of a duplex DNA), or by similar errors accessioned into the public database. Such errors can readily be identified and corrected by resequencing of the genomic locus using standard techniques.

[0074] Single nucleotide polymorphisms (SNPs) occur frequently in eukaryotic genomes—more than 1.4 million SNPs have already identified in the human genome, International Human Genome Sequencing Consortium, Nature 409:860-921 (2001)—and the sequence determined from one individual of a species may differ from other allelic forms present within the population. Additionally, small deletions and insertions, rather than single nucleotide polymorphisms, are not uncommon in the general population, and often do not alter the function of the protein.

[0075] Accordingly, it is an aspect of the present invention to provide nucleic acids not only identical in sequence to those described with particularity herein, but also to provide isolated nucleic acids at least about 65% identical in sequence to those described with particularity herein, typically at least about 70%, 75%, 80%, 85%, or 90% identical in sequence to those described with particularity herein, usefully at least about 91%, 92%, 93%, 94%, or 95% identical in sequence to those described with particularity herein, usefully at least about 96%, 97%, 98%, or 99% identical in sequence to those described with particularity herein, and, most conservatively, at least about 99.5%, 99.6%, 99.7%, 99.8% and 99.9% identical in sequence to those described with particularity herein. These sequence variants can be naturally occurring or can result from human intervention, as by random or directed mutagenesis.

[0076] For purposes herein, percent identity of two nucleic acid sequences is determined using the procedure of Tatiana et al., “Blast 2 sequences—a new tool for comparing protein and nucleotide sequences”, FEMS Microbiol Lett. 174:247-250 (1999), which procedure is effectuated by the computer program BLAST 2 SEQUENCES, available online at http://www.ncbi.nlm.nih.gov/blast/bl2seq/bl2.html. To assess percent identity of nucleic acids, the BLASTN module of BLAST 2 SEQUENCES is used with default values of (i) reward for a match: 1; (ii) penalty for a mismatch: −2; (iii) open gap 5 and extension gap 2 penalties; (iv) gap X_dropoff 50 expect 10 word size 11 filter, and both sequences are entered in their entireties.

[0077] As is well known, the genetic code is degenerate, with each amino acid except methionine translated from a plurality of codons, thus permitting a plurality of nucleic acids of disparate sequence to encode the identical protein. As is also well known, codon choice for optimal expression varies from species to species. The isolated nucleic acids of the present invention being useful for expression of HTPL proteins and protein fragments, it is, therefore, another aspect of the present invention to provide isolated nucleic acids that encode HTPL proteins and portions thereof not only identical in sequence to those described with particularity herein, but degenerate variants thereof as well.

[0078] As is also well known, amino acid substitutions occur frequently among natural allelic variants, with conservative substitutions often occasioning only de minimis change in protein function.

[0079] Accordingly, it is an aspect of the present invention to provide nucleic acids not only identical in sequence to those described with particularity herein, but also to provide isolated nucleic acids that encode HTPL, and portions thereof, having conservative amino acid substitutions, and also to provide isolated nucleic acids that encode HTPL, and portions thereof, having moderately conservative amino acid substitutions.

[0080] Although there are a variety of metrics for calling conservative amino acid substitutions, based primarily on either observed changes among evolutionarily related proteins or on predicted chemical similarity, for purposes herein a conservative replacement is any change having a positive value in the PAM250 log-likelihood matrix reproduced herein below (see Gonnet et al., Science 256 (5062):1443-5 (1992)):

$$\begin{matrix} & A & R & N & D & C & Q & E & G & H & I & L & K & M & F & P & S & T & W & Y & V \\ A & 2 & - 1 & 0 & 0 & 0 & 0 & 0 & 0 & - 1 & - 1 & - 1 & 0 & - 1 & - 2 & 0 & 1 & 1 & - 4 & - 2 & 0 \\ R & - 1 & 5 & 0 & 0 & - 2 & 2 & 0 & - 1 & 1 & - 2 & - 2 & 3 & - 2 & - 3 & - 1 & 0 & 0 & - 2 & - 2 & - 2 \\ N & 0 & 0 & 4 & 2 & - 2 & 1 & 1 & 0 & 1 & - 3 & - 3 & 1 & - 2 & - 3 & - 1 & 1 & 0 & - 4 & - 1 & - 2 \\ D & 0 & 0 & 2 & 5 & - 3 & 1 & 3 & 0 & 0 & - 4 & - 4 & 0 & - 3 & - 4 & - 1 & 0 & 0 & - 5 & - 3 & - 3 \\ C & 0 & - 2 & - 2 & - 3 & 12 & - 2 & - 3 & - 2 & - 1 & - 1 & - 2 & - 3 & - 1 & - 1 & - 3 & 0 & 0 & - 1 & 0 & 0 \\ Q & 0 & 2 & 1 & 1 & - 2 & 3 & 2 & - 1 & 1 & - 2 & - 2 & 2 & - 1 & - 3 & 0 & 0 & 0 & - 3 & - 2 & - 2 \\ E & 0 & 0 & 1 & 3 & - 3 & 2 & 4 & - 1 & 0 & - 3 & - 3 & 1 & - 2 & - 4 & 0 & 0 & 0 & - 4 & - 3 & - 2 \\ G & 0 & - 1 & 0 & 0 & - 2 & - 1 & - 1 & 7 & - 1 & - 4 & - 4 & - 1 & - 4 & - 5 & - 2 & 0 & - 1 & - 4 & - 4 & - 3 \\ H & - 1 & 1 & 1 & 0 & - 1 & 1 & 0 & - 1 & 6 & - 2 & - 2 & 1 & - 1 & 0 & - 1 & 0 & 0 & - 1 & 2 & - 2 \\ I & - 1 & - 2 & - 3 & - 4 & - 1 & - 2 & - 3 & - 4 & - 2 & 4 & 3 & - 2 & 2 & 1 & - 3 & - 2 & - 1 & - 2 & - 1 & 3 \\ L & - 1 & - 2 & - 3 & - 4 & - 2 & - 2 & - 3 & - 4 & - 2 & 3 & 4 & - 2 & 3 & 2 & - 2 & - 2 & - 1 & - 1 & 0 & 2 \\ K & 0 & 3 & 1 & 0 & - 3 & 2 & 1 & - 1 & 1 & - 2 & - 2 & 3 & - 1 & - 3 & - 1 & 0 & 0 & - 4 & - 2 & - 2 \\ M & - 1 & - 2 & - 2 & - 3 & - 1 & - 1 & - 2 & - 4 & - 1 & 2 & 3 & - 1 & 4 & 2 & - 2 & - 1 & - 1 & - 1 & 0 & 2 \\ F & - 2 & - 3 & - 3 & - 4 & - 1 & - 3 & - 4 & - 5 & 0 & 1 & 2 & - 3 & 2 & 7 & - 4 & - 3 & - 2 & 4 & 5 & 0 \\ P & 0 & - 1 & - 1 & - 1 & - 3 & 0 & 0 & - 2 & - 1 & - 3 & - 2 & - 1 & - 2 & - 4 & 8 & 0 & 0 & - 5 & - 3 & - 2 \\ S & 1 & 0 & 1 & 0 & 0 & 0 & 0 & 0 & 0 & - 2 & - 2 & 0 & - 1 & - 3 & 0 & 2 & 2 & - 3 & - 2 & - 1 \\ T & 1 & 0 & 0 & 0 & 0 & 0 & 0 & - 1 & 0 & - 1 & - 1 & 0 & - 1 & - 2 & 0 & 2 & 2 & - 4 & - 2 & 0 \\ W & - 4 & - 2 & - 4 & - 5 & - 1 & - 3 & - 4 & - 4 & - 1 & - 2 & - 1 & - 4 & - 1 & 4 & - 5 & - 3 & - 4 & 14 & 4 & - 3 \\ Y & - 2 & - 2 & - 1 & - 3 & 0 & - 2 & - 3 & - 4 & 2 & - 1 & 0 & - 2 & 0 & 5 & - 3 & - 2 & - 2 & 4 & 8 & - 1 \\ V & 0 & - 2 & - 2 & - 3 & 0 & - 2 & - 2 & - 3 & - 2 & 3 & 2 & - 2 & 2 & 0 & - 2 & - 1 & 0 & - 3 & - 1 & 3\end{matrix}$$

For purposes herein, a “moderately conservative” replacement is any change having a nonnegative value in the PAM250 log-likelihood matrix reproduced herein above.

[0081] As is also well known in the art, relatedness of nucleic acids can also be characterized using a functional test, the ability of the two nucleic acids to base-pair to one another at defined hybridization stringencies.

[0082] It is, therefore, another aspect of the invention to provide isolated nucleic acids not only identical in sequence to those described with particularity herein, but also to provide isolated nucleic acids (“cross-hybridizing nucleic acids”) that hybridize under high stringency conditions (as defined herein below) to all or to a portion of various of the isolated HTPL nucleic acids of the present invention (“reference nucleic acids”), as well as cross-hybridizing nucleic acids that hybridize under moderate stringency conditions to all or to a portion of various of the isolated HTPL nucleic acids of the present invention.

[0083] Such cross-hybridizing nucleic acids are useful, inter alia, as probes for, and to drive expression of, proteins related to the proteins of the present invention as alternative isoforms, homologues, paralogues, and orthologues. Particularly useful orthologues are those from other primate species, such as chimpanzee, rhesus macaque, monkey, baboon, orangutan, and gorilla; from rodents, such as rats, mice, guinea pigs; from lagomorphs, such as rabbits; and from domestic livestock, such as cow, pig, sheep, horse, goat and chicken.

[0084] For purposes herein, high stringency conditions are defined as aqueous hybridization (i.e., free of formamide) in 6× SSC (where 20× SSC contains 3.0 M NaCl and 0.3 M sodium citrate), 1% SDS at 65° C. for at least 8 hours, followed by one or more washes in 0.2× SSC, 0.1% SDS at 65° C. For purposes herein, moderate stringency conditions are defined as aqueous hybridization (i.e., free of formamide) in 6× SSC, 1% SDS at 65° C. for at least 8 hours, followed by one or more washes in 2×SSC, 0.1% SDS at room temperature.

[0085] The hybridizing portion of the reference nucleic acid is typically at least 15 nucleotides in length, often at least 17 nucleotides in length. Often, however, the hybridizing portion of the reference nucleic acid is at least 20 nucleotides in length, 25 nucleotides in length, and even 30 nucleotides, 35 nucleotides, 40 nucleotides, and 50 nucleotides in length. Of course, cross-hybridizing nucleic acids that hybridize to a larger portion of the reference nucleic acid—for example, to a portion of at least 50 nt, at least 100 nt, at least 150 nt, 200 nt, 250 nt, 300 nt, 350 nt, 400 nt, 450 nt, or 500 nt or more—or even to the entire length of the reference nucleic acid, are also useful.

[0086] The hybridizing portion of the cross-hybridizing nucleic acid is at least 75% identical in sequence to at least a portion of the reference nucleic acid. Typically, the hybridizing portion of the cross-hybridizing nucleic acid is at least 80%, often at least 85%, 86%, 87%, 88%, 89% or even at least 90% identical in sequence to at least a portion of the reference nucleic acid. Often, the hybridizing portion of the cross-hybridizing nucleic acid will be at least 91%, 92%, 93%, 94%, 95%, 96%, 97%, 98%, or 99% identical in sequence to at least a portion of the reference nucleic acid sequence. At times, the hybridizing portion of the cross-hybridizing nucleic acid will be at least 99.5% identical in sequence to at least a portion of the reference nucleic acid.

[0087] The invention also provides fragments of various of the isolated nucleic acids of the present invention.

[0088] By “fragments” of a reference nucleic acid is here intended isolated nucleic acids, however obtained, that have a nucleotide sequence identical to a portion of the reference nucleic acid sequence, which portion is at least 17 nucleotides and less than the entirety of the reference nucleic acid. As so defined, “fragments” need not be obtained by physical fragmentation of the reference nucleic acid, although such provenance is not thereby precluded.

[0089] In theory, an oligonucleotide of 17 nucleotides is of sufficient length as to occur at random less frequently than once in the three gigabase human genome, and thus to provide a nucleic acid probe that can uniquely identify the reference sequence in a nucleic acid mixture of genomic complexity. As is well known, further specificity can be obtained by probing nucleic acid samples of subgenomic complexity, and/or by using plural fragments as short as 17 nucleotides in length collectively to prime amplification of nucleic acids, as, e.g., by polymerase chain reaction (PCR).

[0090] As further described herein below, nucleic acid fragments that encode at least 6 contiguous amino acids (i.e., fragments of 18 nucleotides or more) are useful in directing the expression or the synthesis of peptides that have utility in mapping the epitopes of the protein encoded by the reference nucleic acid. See, e.g., Geysen et al., “Use of peptide synthesis to probe viral antigens for epitopes to a resolution of a single amino acid,” Proc. Natl. Acad. Sci. USA 81:3998-4002 (1984); and U.S. Pat. Nos. 4,708,871 and 5,595,915, the disclosures of which are incorporated herein by reference in their entireties.

[0091] As further described herein below, fragments that encode at least 8 contiguous amino acids (i.e., fragments of 24 nucleotides or more) are useful in directing the expression or the synthesis of peptides that have utility as immunogens. See, e.g., Lerner, “Tapping the immunological repertoire to produce antibodies of predetermined specificity,” Nature 299:592-596 (1982); Shinnick et al., “Synthetic peptide immunogens as vaccines,” Annu. Rev. Microbiol. 37:425-46 (1983); Sutcliffe et al., “Antibodies that react with predetermined sites on proteins,” Science 219:660-6 (1983), the disclosures of which are incorporated herein by reference in their entireties.

[0092] The nucleic acid fragment of the present invention is thus at least 17 nucleotides in length, typically at least 18 nucleotides in length, and often at least 24 nucleotides in length. Often, the nucleic acid of the present invention is at least 25 nucleotides in length, and even 30 nucleotides, 35 nucleotides, 40 nucleotides, or 45 nucleotides in length. Of course, larger fragments having at least 50 nt, at least 100 nt, at least 150 nt, 200 nt, 250 nt, 300 nt, 350 nt, 400 nt, 450 nt, or 500 nt or more are also useful, and at times preferred.

[0093] Having been based upon the mining of genomic sequence, rather than upon surveillance of expressed message, the present invention further provides isolated genome-derived nucleic acids that include portions of the HTPL gene.

[0094] The invention particularly provides genome-derived single exon probes.

[0095] As further described in commonly owned and copending U.S. patent application Ser. No. 09/864,761, filed May 23, 2001; Ser. No. 09/774,203, filed Jan. 29, 2001; and Ser. No. 09/632,366, filed Aug. 3, 2000, the disclosures of which are incorporated herein by reference in their entireties, “a single exon probe” comprises at least part of an exon (“reference exon”) and can hybridize detectably under high stringency conditions to transcript-derived nucleic acids that include the reference exon. The single exon probe will not, however, hybridize detectably under high stringency conditions to nucleic acids that lack the reference exon and instead consist of one or more exons that are found adjacent to the reference exon in the genome.

[0096] Genome-derived single exon probes typically further comprise, contiguous to a first end of the exon portion, a first intronic and/or intergenic sequence that is identically contiguous to the exon in the genome. Often, the genome-derived single exon probe further comprises, contiguous to a second end of the exonic portion, a second intronic and/or intergenic sequence that is identically contiguous to the exon in the genome.

[0097] The minimum length of genome-derived single exon probes is defined by the requirement that the exonic portion be of sufficient length to hybridize under high stringency conditions to transcript-derived nucleic acids. Accordingly, the exon portion is at least 17 nucleotides, typically at least 18 nucleotides, 20 nucleotides, 24 nucleotides, 25 nucleotides or even 30, 35, 40, 45, or 50 nucleotides in length, and can usefully include the entirety of the exon, up to 100 nt, 150 nt, 200 nt, 250 nt, 300 nt, 350 nt, 400 nt or even 500 nt or more in length.

[0098] The maximum length of genome-derived single exon probes is defined by the requirement that the probes contain portions of no more than one exon, that is, be unable to hybridize detectably under high stringency conditions to nucleic acids that lack the reference exon but include one or more exons that are found adjacent to the reference exon the genome.

[0099] Given variable spacing of exons through eukaryotic genomes, the maximum length of single exon probes of the present invention is typically no more than 25 kb, often no more than 20 kb, 15 kb, 10 kb or 7.5 kb, or even no more than 5 kb, 4 kb, 3 kb, or even no more than about 2.5 kb in length.

[0100] The genome-derived single exon probes of the present invention can usefully include at least a first terminal priming sequence not found in contiguity with the rest of the probe sequence in the genome, and often will contain a second terminal priming sequence not found in contiguity with the rest of the probe sequence in the genome.

[0101] The present invention also provides isolated genome-derived nucleic acids that include nucleic acid sequence elements that control transcription of the HTPL gene.

[0102] With a complete draft of the human genome now available, genomic sequences that are within the vicinity of the HTPL coding region (and that are additional to those described with particularity herein) can readily be obtained by PCR amplification.

[0103] The isolated nucleic acids of the present invention can be composed of natural nucleotides in native 5′-3′ phosphodiester internucleoside linkage—e.g., DNA or RNA—or can contain any or all of nonnatural nucleotide analogues, normative internucleoside bonds, or post-synthesis modifications, either throughout the length of the nucleic acid or localized to one or more portions thereof.

[0104] As is well known in the art, when the isolated nucleic acid is used as a hybridization probe, the range of such nonnatural analogues, normative internucleoside bonds, or post-synthesis modifications will be limited to those that permit sequence-discriminating basepairing of the resulting nucleic acid. When used to direct expression or RNA or protein in vitro or in vivo, the range of such nonnatural analogues, normative internucleoside bonds, or post-synthesis modifications will be limited to those that permit the nucleic acid to function properly as a polymerization substrate. When the isolated nucleic acid is used as a therapeutic agent, the range of such changes will be limited to those that do not confer toxicity upon the isolated nucleic acid.

[0105] For example, when desired to be used as probes, the isolated nucleic acids of the present invention can usefully include nucleotide analogues that incorporate labels that are directly detectable, such as radiolabels or fluorophores, or nucleotide analogues that incorporate labels that can be visualized in a subsequent reaction, such as biotin or various haptens.

[0106] Common radiolabeled analogues include those labeled with ³³P, ³²P, and ³⁵S, such as α-³²P-dATP, α-³²P-dCTP, α-³²P-dGTP, α-³²P-dTTP, α-³²P-3′dATP, α-³²P-ATP, α-³²P-CTP, α-³²P-UTP, α-³⁵S-dATP, γ-³⁵S-GTP, γ-³³P-dATP, and the like.

[0107] Commercially available fluorescent nucleotide analogues readily incorporated into the nucleic acids of the present invention include Cy3-dCTP, Cy3-dUTP, Cy5-dCTP, Cy3-dUTP (Amersham Pharmacia Biotech, Piscataway, N.J., USA), fluorescein-12-dUTP, tetramethylrhodamine-6-dUTP, Texas Red®-5-dUTP, Cascade Blue®-7-dUTP, BODIPY® FL-14-dUTP, BODIPY® TMR-14-dUTP, BODIPY® TR-14-dUTP, Rhodamine Green™-5-dUTP, Oregon Green® 488-5-dUTP, Texas Red®-12-dUTP, BODIPY® 630/650-14-dUTP, BODIPY® 650/665-14-dUTP, Alexa Fluor® 488-5-dUTP, Alexa Fluor® 532-5-dUTP, Alexa Fluor® 568-5-dUTP, Alexa Fluor® 594-5-dUTP, Alexa Fluor® 546-14-dUTP, fluorescein-12-UTP, tetramethylrhodamine-6-UTP, Texas Red®-5-UTP, Cascade Blue®-7-UTP, BODIPY® FL-14-UTP, BODIPY® TMR-14-UTP, BODIPY® TR-14-UTP, Rhodamine Green™-5-UTP, Alexa Fluor® 488-5-UTP, Alexa Fluor® 546-14-UTP (Molecular Probes, Inc. Eugene, Oreg., USA).

[0108] Protocols are available for custom synthesis of nucleotides having other fluorophores. Henegariu et al., “Custom Fluorescent-Nucleotide Synthesis as an Alternative Method for Nucleic Acid Labeling,” Nature Biotechnol. 18:345-348 (2000), the disclosure of which is incorporated herein by reference in its entirety.

[0109] Haptens that are commonly conjugated to nucleotides for subsequent labeling include biotin (biotin-11-dUTP, Molecular Probes, Inc., Eugene, Oreg., USA; biotin-21-UTP, biotin-21-dUTP, Clontech Laboratories, Inc., Palo Alto, Calif., USA), digoxigenin (DIG-11-dUTP, alkali labile, DIG-11-UTP, Roche Diagnostics Corp., Indianapolis, Ind., USA), and dinitrophenyl (dinitrophenyl-11-dUTP, Molecular Probes, Inc., Eugene, Oreg., USA).

[0110] As another example, when desired to be used for antisense inhibition of transcription or translation, the isolated nucleic acids of the present invention can usefully include altered, often nuclease-resistant, internucleoside bonds. See Hartmann et al. (eds.), Manual of Antisense Methodology (Perspectives in Antisense Science), Kluwer Law International (1999) (ISBN: 079238539X); Stein et al. (eds.), Applied Antisense Oligonucleotide Technology, Wiley-Liss (cover (1998) (ISBN: 0471172790); Chadwick et al. (eds.), Oligonucleotides as Therapeutic Agents—Symposium No. 209, John Wiley & Son Ltd (1997) (ISBN: 0471972797), the disclosures of which are incorporated herein by reference in their entireties. Such altered internucloside bonds are often desired also when the isolated nucleic acid of the present invention is to be used for targeted gene correction, Gamper et al., Nucl. Acids Res. 28 (21):4332-4339 (2000), the disclosures of which are incorporated herein by reference in its entirety.

[0111] Modified oligonucleotide backbones often preferred when the nucleic acid is to be used for antisense purposes are, for example, phosphorothioates, chiral phosphorothioates, phosphorodithioates, phosphotriesters, aminoalkylphosphotriesters, methyl and other alkyl phosphonates including 3′-alkylene phosphonates and chiral phosphonates, phosphinates, phosphoramidates including 3′-amino phosphoramidate and aminoalkylphosphoramidates, thionophosphoramidates, thionoalkylphosphonates, thionoalkylphosphotriesters, and boranophosphates having normal 3′-5′ linkages, 2′-5′ linked analogs of these, and those having inverted polarity wherein the adjacent pairs of nucleoside units are linked 3′-5′ to 5′-3′ or 2′-5′ to 5′-2′. Representative U.S. patents that teach the preparation of the above phosphorus-containing linkages include, but are not limited to, U.S. Pat. Nos. 3,687,808; 4,469,863; 4,476,301; 5,023,243; 5,177,196; 5,188,897; 5,264,423; 5,276,019; 5,278,302; 5,286,717; 5,321,131; 5,399,676; 5,405,939; 5,453,496; 5,455,233; 5,466,677; 5,476,925; 5,519,126; 5,536,821; 5,541,306; 5,550,111; 5,563,253; 5,571,799; 5,587,361; and 5,625,050, the disclosures of which are incorporated herein by reference in their entireties.

[0112] Preferred modified oligonucleotide backbones for antisense use that do not include a phosphorus atom have backbones that are formed by short chain alkyl or cycloalkyl internucleoside linkages, mixed heteroatom and alkyl or cycloalkyl internucleoside linkages, or one or more short chain heteroatomic or heterocyclic internucleoside linkages. These include those having morpholino linkages (formed in part from the sugar portion of a nucleoside); siloxane backbones; sulfide, sulfoxide and sulfone backbones; formacetyl and thioformacetyl backbones; methylene formacetyl and thioformacetyl backbones; alkene containing backbones; sulfamate backbones; methyleneimino and methylenehydrazino backbones; sulfonate and sulfonamide backbones; amide backbones; and others having mixed N, O, S and CH₂ component parts. Representative U.S. patents that teach the preparation of the above backbones include, but are not limited to, U.S. Pat. Nos. 5,034,506; 5,166,315; 5,185,444; 5,214,134; 5,216,141; 5,235,033; 5,264,562; 5,264,564; 5,405,938; 5,434,257; 5,466,677; 5,470,967; 5,489,677; 5,541,307; 5,561,225; 5,596,086; 5,602,240; 5,610,289; 5,602,240; 5,608,046; 5,610,289; 5,618,704; 5,623,070; 5,663,312; 5,633,360; 5,677,437; and 5,677,439, the disclosures of which are incorporated herein by reference in their entireties.

[0113] In other preferred oligonucleotide mimetics, both the sugar and the internucleoside linkage are replaced with novel groups, such as peptide nucleic acids (PNA).

[0114] In PNA compounds, the phosphodiester backbone of the nucleic acid is replaced with an amide-containing backbone, in particular by repeating N-(2-aminoethyl)glycine units linked by amide bonds. Nucleobases are bound directly or indirectly to aza nitrogen atoms of the amide portion of the backbone, typically by methylene carbonyl linkages.

[0115] The uncharged nature of the PNA backbone provides PNA/DNA and PNA/RNA duplexes with a higher thermal stability than is found in DNA/DNA and DNA/RNA duplexes, resulting from the lack of charge repulsion between the PNA and DNA or RNA strand. In general, the Tm of a PNA/DNA or PNA/RNA duplex is 1° C. higher per base pair than the Tm of the corresponding DNA/DNA or DNA/RNA duplex (in 100 mM NaCl).

[0116] The neutral backbone also allows PNA to form stable DNA duplexes largely independent of salt concentration. At low ionic strength, PNA can be hybridized to a target sequence at temperatures that make DNA hybridization problematic or impossible. And unlike DNA/DNA duplex formation, PNA hybridization is possible in the absence of magnesium. Adjusting the ionic strength, therefore, is useful if competing DNA or RNA is present in the sample, or if the nucleic acid being probed contains a high level of secondary structure.

[0117] PNA also demonstrates greater specificity in binding to complementary DNA. A PNA/DNA mismatch is more destabilizing than DNA/DNA mismatch. A single mismatch in mixed a PNA/DNA 15-mer lowers the Tm by 8-20° C. (15° C. on average). In the corresponding DNA/DNA duplexes, a single mismatch lowers the Tm by 4-16° C. (11° C. on average). Because PNA probes can be significantly shorter than DNA probes, their specificity is greater.

[0118] Additionally, nucleases and proteases do not recognize the PNA polyamide backbone with nucleobase sidechains. As a result, PNA oligomers are resistant to degradation by enzymes, and the lifetime of these compounds is extended both in vivo and in vitro. In addition, PNA is stable over a wide pH range.

[0119] Because its backbone is formed from amide bonds, PNA can be synthesized using a modified peptide synthesis protocol. PNA oligomers can be synthesized by both Fmoc and tBoc methods. Representative U.S. patents that teach the preparation of PNA compounds include, but are not limited to, U.S. Pat. Nos. 5,539,082; 5,714,331; and 5,719,262, each of which is herein incorporated by reference; automated PNA synthesis is readily achievable on commercial synthesizers (see, e.g., “PNA User's Guide,” Rev. 2, February 1998, Perseptive Biosystems Part No. 60138, Applied Biosystems, Inc., Foster City, Calif.).

[0120] PNA chemistry and applications are reviewed, inter alia, in Ray et al., FASEB J. 14(9):1041-60 (2000); Nielsen et al., Pharmacol Toxicol. 86(1):3-7 (2000); Larsen et al., Biochim Biophys Acta. 1489(1):159-66 (1999); Nielsen, Curr. Opin. Struct. Biol. 9(3):353-7 (1999), and Nielsen, Curr. Opin. Biotechnol. 10(1):71-5 (1999), the disclosures of which are incorporated herein by reference in their entireties.

[0121] Differences from nucleic acid compositions found in nature—e.g., normative bases, altered internucleoside linkages, post-synthesis modification—can be present throughout the length of the nucleic acid or can, instead, usefully be localized to discrete portions thereof. As an example of the latter, chimeric nucleic acids can be synthesized that have discrete DNA and RNA domains and demonstrated utility for targeted gene repair, as further described in U.S. Pat. Nos. 5,760,012 and 5,731,181, the disclosures of which are incorporated herein by reference in their entireties. As another example, chimeric nucleic acids comprising both DNA and PNA have been demonstrated to have utility in modified PCR reactions. See Misra et al., Biochem. 37: 1917-1925 (1998); see also Finn et al., Nucl. Acids Res. 24: 3357-3363 (1996), incorporated herein by reference.

[0122] Unless otherwise specified, nucleic acids of the present invention can include any topological conformation appropriate to the desired use; the term thus explicitly comprehends, among others, single-stranded, double-stranded, triplexed, quadruplexed, partially double-stranded, partially-triplexed, partially-quadruplexed, branched, hairpinned, circular, and padlocked conformations. Padlock conformations and their utilities are further described in Ban\acute{er} et al., Curr. Opin. Biotechnol. 12:11-15 (2001); Escude et al., Proc. Natl. Acad. Sci. USA 14; 96(19): 10603-7 (1999); Nilsson et al., Science 265(5181):2085-8 (1994), the disclosures of which are incorporated herein by reference in their entireties. Triplex and quadruplex conformations, and their utilities, are reviewed in Praseuth et al., Biochim. Biophys. Acta. 1489(1):181-206 (1999); Fox, Curr. Med. Chem. 7(1):17-37 (2000); Kochetkova et al., Methods Mol. Biol. 130:189-201 (2000); Chan et al., J. Mol. Med. 75(4):267-82 (1997), the disclosures of which are incorporated herein by reference in their entireties.

[0123] The nucleic acids of the present invention can be detectably labeled.

[0124] Commonly-used labels include radionuclides, such as ³²P, ³³P, ³⁵S, ³H (and for NMR detection, ¹³C and ¹⁵N), haptens that can be detected by specific antibody or high affinity binding partner (such as avidin), and fluorophores.

[0125] As noted above, detectable labels can be incorporated by inclusion of labeled nucleotide analogues in the nucleic acid. Such analogues can be incorporated by enzymatic polymerization, such as by nick translation, random priming, polymerase chain reaction (PCR), terminal transferase tailing, and end-filling of overhangs, for DNA molecules, and in vitro transcription driven, e.g., from phage promoters, such as T7, T3, and SP6, for RNA molecules. Commercial kits are readily available for each such labeling approach.

[0126] Analogues can also be incorporated during automated solid phase chemical synthesis.

[0127] As is well known, labels can also be incorporated after nucleic acid synthesis, with the 5′ phosphate and 3′ hydroxyl providing convenient sites for post-synthetic covalent attachment of detectable labels.

[0128] Various other post-synthetic approaches permit internal labeling of nucleic acids.

[0129] For example, fluorophores can be attached using a cisplatin reagent that reacts with the N7 of guanine residues (and, to a lesser extent, adenine bases) in DNA, RNA, and PNA to provide a stable coordination complex between the nucleic acid and fluorophore label (Universal Linkage System) (available from Molecular Probes, Inc., Eugene, Oreg., USA and Amersham Pharmacia Biotech, Piscataway, N.J., USA); see Alers et al., Genes, Chromosomes & Cancer, Vol. 25, pp. 301-305 (1999); Jelsma et al., J. NIH Res. 5:82 (1994); Van Belkum et al., BioTechniques 16:148-153 (1994), incorporated herein by reference. As another example, nucleic acids can be labeled using a disulfide-containing linker (FastTag™ Reagent, Vector Laboratories, Inc., Burlingame, Calif., USA) that is photo- or thermally coupled to the target nucleic acid using aryl azide chemistry; after reduction, a free thiol is available for coupling to a hapten, fluorophore, sugar, affinity ligand, or other marker.

[0130] Multiple independent or interacting labels can be incorporated into the nucleic acids of the present invention.

[0131] For example, both a fluorophore and a moiety that in proximity thereto acts to quench fluorescence can be included to report specific hybridization through release of fluorescence quenching, Tyagi et al., Nature Biotechnol. 14: 303-308 (1996); Tyagi et al., Nature Biotechnol. 16, 49-53 (1998); Sokol et al., Proc. Natl. Acad. Sci. USA 95: 11538-11543 (1998); Kostrikis et al., Science 279:1228-1229 (1998); Marras et al., Genet. Anal. 14: 151-156 (1999); U.S. Pat. Nos. 5,846,726, 5,925,517, 5925517, or to report exonucleotidic excision, U.S. Pat. No. 5,538,848; Holland et al., Proc. Natl. Acad. Sci. USA 88:7276-7280 (1991); Heid et al., Genome Res. 6(10):986-94 (1996); Kuimelis et al., Nucleic Acids Symp Ser. (37):255-6 (1997); U.S. Pat. No. 5,723,591, the disclosures of which are incorporated herein by reference in their entireties.

[0132] So labeled, the isolated nucleic acids of the present invention can be used as probes, as further described below.

[0133] Nucleic acids of the present invention can also usefully be bound to a substrate. The substrate can porous or solid, planar or non-planar, unitary or distributed; the bond can be covalent or noncovalent. Bound to a substrate, nucleic acids of the present invention can be used as probes in their unlabeled state.

[0134] For example, the nucleic acids of the present invention can usefully be bound to a porous substrate, commonly a membrane, typically comprising nitrocellulose, nylon, or positively-charged derivatized nylon; so attached, the nucleic acids of the present invention can be used to detect HTPL nucleic acids present within a labeled nucleic acid sample, either a sample of genomic nucleic acids or a sample of transcript-derived nucleic acids, e.g. by reverse dot blot.

[0135] The nucleic acids of the present invention can also usefully be bound to a solid substrate, such as glass, although other solid materials, such as amorphous silicon, crystalline silicon, or plastics, can also be used. Such plastics include polymethylacrylic, polyethylene, polypropylene, polyacrylate, polymethylmethacrylate, polyvinylchloride, polytetrafluoroethylene, polystyrene, polycarbonate, polyacetal, polysulfone, celluloseacetate, cellulosenitrate, nitrocellulose, or mixtures thereof.

[0136] Typically, the solid substrate will be rectangular, although other shapes, particularly disks and even spheres, present certain advantages. Particularly advantageous alternatives to glass slides as support substrates for array of nucleic acids are optical discs, as described in Demers, “Spatially Addressable Combinatorial Chemical Arrays in CD-ROM Format,” international patent publication WO 98/12559, incorporated herein by reference in its entirety.

[0137] The nucleic acids of the present invention can be attached covalently to a surface of the support substrate or applied to a derivatized surface in a chaotropic agent that facilitates denaturation and adherence by presumed noncovalent interactions, or some combination thereof.

[0138] The nucleic acids of the present invention can be bound to a substrate to which a plurality of other nucleic acids are concurrently bound, hybridization to each of the plurality of bound nucleic acids being separately detectable. At low density, e.g. on a porous membrane, these substrate-bound collections are typically denominated macroarrays; at higher density, typically on a solid support, such as glass, these substrate bound collections of plural nucleic acids are colloquially termed microarrays. As used herein, the term microarray includes arrays of all densities. It is, therefore, another aspect of the invention to provide microarrays that include the nucleic acids of the present invention.

[0139] The isolated nucleic acids of the present invention can be used as hybridization probes to detect, characterize, and quantify HTPL nucleic acids in, and isolate HTPL nucleic acids from, both genomic and transcript-derived nucleic acid samples. When free in solution, such probes are typically, but not invariably, detectably labeled; bound to a substrate, as in a microarray, such probes are typically, but not invariably unlabeled.

[0140] For example, the isolated nucleic acids of the present invention can be used as probes to detect and characterize gross alterations in the HTPL genomic locus, such as deletions, insertions, translocations, and duplications of the HTPL genomic locus through fluorescence in situ hybridization (FISH) to chromosome spreads. See, e.g., Andreeff et al. (eds.), Introduction to Fluorescence In Situ Hybridization: Principles and Clinical Applications, John Wiley & Sons (1999) (ISBN: 0471013455), the disclosure of which is incorporated herein by reference in its entirety. The isolated nucleic acids of the present invention can be used as probes to assess smaller genomic alterations using, e.g., Southern blot detection of restriction fragment length polymorphisms. The isolated nucleic acids of the present invention can be used as probes to isolate genomic clones that include the nucleic acids of the present invention, which thereafter can be restriction mapped and sequenced to identify deletions, insertions, translocations, and substitutions (single nucleotide polymorphisms, SNPs) at the sequence level.

[0141] The isolated nucleic acids of the present invention can also be used as probes to detect, characterize, and quantify HTPL nucleic acids in, and isolate HTPL nucleic acids from, transcript-derived nucleic acid samples.

[0142] For example, the isolated nucleic acids of the present invention can be used as hybridization probes to detect, characterize by length, and quantify HTPL mRNA by northern blot of total or poly-A⁺—selected RNA samples. For example, the isolated nucleic acids of the present invention can be used as hybridization probes to detect, characterize by location, and quantify HTPL message by in situ hybridization to tissue sections (see, e.g., Schwarchzacher et al., In Situ Hybridization, Springer-Verlag New York (2000) (ISBN: 0387915966), the disclosure of which is incorporated herein by reference in its entirety). For example, the isolated nucleic acids of the present invention can be used as hybridization probes to measure the representation of HTPL clones in a cDNA library. For example, the isolated nucleic acids of the present invention can be used as hybridization probes to isolate HTPL nucleic acids from cDNA libraries, permitting sequence level characterization of HTPL messages, including identification of deletions, insertions, truncations—including deletions, insertions, and truncations of exons in alternatively spliced forms—and single nucleotide polymorphisms.

[0143] All of the aforementioned probe techniques are well within the skill in the art, and are described at greater length in standard texts such as Sambrook et al., Molecular Cloning: A Laboratory Manual (3^{rd} ed.), Cold Spring Harbor Laboratory Press (2001) (ISBN: 0879695773); Ausubel et al. (eds.), Short Protocols in Molecular Biology: A Compendium of Methods from Current Protocols in Molecular Biology (4^{th} ed.), John Wiley & Sons, 1999 (ISBN: 047132938X); and Walker et al. (eds.), The Nucleic Acids Protocols Handbook, Humana Press (2000) (ISBN: 0896034593), the disclosures of which are incorporated herein by reference in their entirety.

[0144] As described in the Examples herein below, the nucleic acids of the present invention can also be used to detect and quantify HTPL nucleic acids in transcript-derived samples—that is, to measure expression of the HTPL gene—when included in a microarray. Measurement of HTPL expression has particular utility in diagnosis and treatment of male infertility and tumor, as further described in the Examples herein below.

[0145] As would be readily apparent to one of skill in the art, each HTPL nucleic acid probe—whether labeled, substrate-bound, or both—is thus currently available for use as a tool for measuring the level of HTPL expression in the tissue in which expression has already been confirmed, notably testis, also adrenal, adult and fetal liver, bone marrow, brain, kidney, lung, placenta, prostate, skeletal muscle and colon. The utility is specific to the probe: under high stringency conditions, the probe reports the level of expression of message specifically containing that portion of the HTPL gene included within the probe.

[0146] Measuring tools are well known in many arts, not just in molecular biology, and are known to possess credible, specific, and substantial utility. For example, U.S. Pat. No. 6,016,191 describes and claims a tool for measuring characteristics of fluid flow in a hydrocarbon well; U.S. Pat. No. 6,042,549 describes and claims a device for measuring exercise intensity; U.S. Pat. No. 5,889,351 describes and claims a device for measuring viscosity and for measuring characteristics of a fluid; U.S. Pat. No. 5,570,694 describes and claims a device for measuring blood pressure; U.S. Pat. No. 5,930,143 describes and claims a device for measuring the dimensions of machine tools; U.S. Pat. No. 5,279,044 describes and claims a measuring device for determining an absolute position of a movable element; U.S. Pat. No. 5,186,042 describes and claims a device for measuring action force of a wheel; and U.S. Pat. No. 4,246,774 describes and claims a device for measuring the draft of smoking articles such as cigarettes.

[0147] As for tissues not yet demonstrated to express HTPL, the HTPL nucleic acid probes of the present invention are currently available as tools for surveying such tissues to detect the presence of HTPL nucleic acids.

[0148] Survey tools—i.e., tools for determining the presence and/or location of a desired object by search of an area—are well known in many arts, not just in molecular biology, and are known to possess credible, specific, and substantial utility. For example, U.S. Pat. No. 6,046,800 describes and claims a device for surveying an area for objects that move; U.S. Pat. No. 6,025,201 describes and claims an apparatus for locating and discriminating platelets from non-platelet particles or cells on a cell-by-cell basis in a whole blood sample; U.S. Pat. No. 5,990,689 describes and claims a device for detecting and locating anomalies in the electromagnetic protection of a system; U.S. Pat. No. 5,984,175 describes and claims a device for detecting and identifying wearable user identification units; U.S. Pat. No. 3,980,986 (“Oil well survey tool”), describes and claims a tool for finding the position of a drill bit working at the bottom of a borehole.

[0149] As noted above, the nucleic acid probes of the present invention are useful in constructing microarrays; the microarrays, in turn, are products of manufacture that are useful for measuring and for surveying gene expression.

[0150] When included on a microarray, each HTPL nucleic acid probe makes the microarray specifically useful for detecting that portion of the HTPL gene included within the probe, thus imparting upon the microarray device the ability to detect a signal where, absent such probe, it would have reported no signal. This utility makes each individual probe on such microarray akin to an antenna, circuit, firmware or software element included in an electronic apparatus, where the antenna, circuit, firmware or software element imparts upon the apparatus the ability newly and additionally to detect signal in a portion of the radio-frequency spectrum where previously it could not; such devices are known to have specific, substantial, and credible utility.

[0151] Changes in the level of expression need not be observed for the measurement of expression to have utility.

[0152] For example, where gene expression analysis is used to assess toxicity of chemical agents on cells, the failure of the agent to change a gene's expression level is evidence that the drug likely does not affect the pathway of which the gene's expressed protein is a part. Analogously, where gene expression analysis is used to assess side effects of pharmacologic agents—whether in lead compound discovery or in subsequent screening of lead compound derivatives—the inability of the agent to alter a gene's expression level is evidence that the drug does not affect the pathway of which the gene's expressed protein is a part.

[0153] WO 99/58720, incorporated herein by reference in its entirety, provides methods for quantifying the relatedness of a first and second gene expression profile and for ordering the relatedness of a plurality of gene expression profiles, without regard to the identity or function of the genes whose expression is used in the calculation.

[0154] Gene expression analysis, including gene expression analysis by microarray hybridization, is, of course, principally a laboratory-based art. Devices and apparatus used principally in laboratories to facilitate laboratory research are well-established to possess specific, substantial, and credible utility. For example, U.S. Pat. No. 6,001,233 describes and claims a gel electrophoresis apparatus having a cam-activated clamp; for example, U.S. Pat. No. 6,051,831 describes and claims a high mass detector for use in time-of-flight mass spectrometers; for example, U.S. Pat. No. 5,824,269 describes and claims a flow cytometer-as is well known, few gel electrophoresis apparatuses, TOF-MS devices, or flow cytometers are sold for consumer use.

[0155] Indeed, and in particular, nucleic acid microarrays, as devices intended for laboratory use in measuring gene expression, are well-established to have specific, substantial and credible utility. Thus, the microarrays of the present invention have at least the specific, substantial and credible utilities of the microarrays claimed as devices and articles of manufacture in the following U.S. patents, the disclosures of each of which is incorporated herein by reference: U.S. Pat. No. 5,445,934 (“Array of oligonucleotides on a solid substrate”); U.S. Pat. No. 5,744,305 (“Arrays of materials attached to a substrate”); and U.S. Pat. No. 6,004,752 (“Solid support with attached molecules”).

[0156] Genome-derived single exon probes and genome-derived single exon probe microarrays have the additional utility, inter alia, of permitting high-throughput detection of splice variants of the nucleic acids of the present invention, as further described in copending and commonly owned U.S. patent application Ser. No. 09/632,366, filed Aug. 3, 2000, the disclosure of which is incorporated herein by reference in its entirety.

[0157] The isolated nucleic acids of the present invention can also be used to prime synthesis of nucleic acid, for purpose of either analysis or isolation, using mRNA, cDNA, or genomic DNA as template.

[0158] For use as primers, at least 17 contiguous nucleotides of the isolated nucleic acids of the present invention will be used. Often, at least 18, 19, or 20 contiguous nucleotides of the nucleic acids of the present invention will be used, and on occasion at least 20, 22, 24, or 25 contiguous nucleotides of the nucleic acids of the present invention will be used, and even 30 nucleotides or more of the nucleic acids of the present invention can be used to prime specific synthesis.

[0159] The nucleic acid primers of the present invention can be used, for example, to prime first strand cDNA synthesis on an mRNA template.

[0160] Such primer extension can be done directly to analyze the message. Alternatively, synthesis on an mRNA template can be done to produce first strand cDNA. The first strand cDNA can thereafter be used, inter alia, directly as a single-stranded probe, as above-described, as a template for sequencing—permitting identification of alterations, including deletions, insertions, and substitutions, both normal allelic variants and mutations associated with abnormal phenotypes- or as a template, either for second strand cDNA synthesis (e.g., as an antecedent to insertion into a cloning or expression vector), or for amplification.

[0161] The nucleic acid primers of the present invention can also be used, for example, to prime single base extension (SBE) for SNP detection (see, e.g., U.S. Pat. No. 6,004,744, the disclosure of which is incorporated herein by reference in its entirety).

[0162] As another example, the nucleic acid primers of the present invention can be used to prime amplification of HTPL nucleic acids, using transcript-derived or genomic DNA as template.

[0163] Primer-directed amplification methods are now well-established in the art. Methods for performing the polymerase chain reaction (PCR) are compiled, inter alia, in McPherson, PCR (Basics: From Background to Bench), Springer Verlag (2000) (ISBN: 0387916008); Innis et al. (eds.), PCR Applications: Protocols for Functional Genomics, Academic Press (1999) (ISBN: 0123721857); Gelfand et al. (eds.), PCR Strategies, Academic Press (1998) (ISBN: 0123721822); Newton et al., PCR, Springer-Verlag New York (1997) (ISBN: 0387915060); Burke (ed.), PCR: Essential Techniques, John Wiley & Son Ltd (1996) (ISBN: 047195697X); White (ed.), PCR Cloning Protocols: From Molecular Cloning to Genetic Engineering, Vol. 67, Humana Press (1996) (ISBN: 0896033430); McPherson et al. (eds.), PCR 2: A Practical Approach, Oxford University Press, Inc. (1995) (ISBN: 0199634254), the disclosures of which are incorporated herein by reference in their entireties. Methods for performing RT-PCR are collected, e.g., in Siebert et al. (eds.), Gene Cloning and Analysis by RT-PCR, Eaton Publishing Company/Bio Techniques Books Division, 1998 (ISBN: 1881299147); Siebert (ed.), PCR Technique:RT-PCR, Eaton Publishing Company/BioTechniques Books (1995) (ISBN: 1881299139), the disclosure of which is incorporated herein by reference in its entirety.

[0164] Isothermal amplification approaches, such as rolling circle amplification, are also now well-described. See, e.g., Schweitzer et al., Curr. Opin. Biotechnol. 12(1):21-7 (2001); U.S. Pat. Nos. 6,235,502, 6,221,603, 6,210,884, 6,183,960, 5,854,033, 5,714,320, 5,648,245, and international patent publications WO 97/19193 and WO 00/15779, the disclosures of which are incorporated herein by reference in their entireties. Rolling circle amplification can be combined with other techniques to facilitate SNP detection. See, e.g., Lizardi et al., Nature Genet. 19(3):225-32 (1998).

[0165] As further described below, nucleic acids of the present invention, inserted into vectors that flank the nucleic acid insert with a phage promoter, such as T7, T3, or SP6 promoter, can be used to drive in vitro expression of RNA complementary to either strand of the nucleic acid of the present invention. The RNA can be used, inter alia, as a single-stranded probe, in cDNA-mRNA subtraction, or for in vitro translation.

[0166] As will be further discussed herein below, nucleic acids of the present invention that encode HTPL protein or portions thereof can be used, inter alia, to express the HTPL proteins or protein fragments, either alone, or as part of fusion proteins.

[0167] Expression can be from genomic nucleic acids of the present invention, or from transcript-derived nucleic acids of the present invention.

[0168] Where protein expression is effected from genomic DNA, expression will typically be effected in eukaryotic, typically mammalian, cells capable of splicing introns from the initial RNA transcript. Expression can be driven from episomal vectors, such as EBV-based vectors, or can be effected from genomic DNA integrated into a host cell chromosome. As will be more fully described below, where expression is from transcript-derived (or otherwise intron-less) nucleic acids of the present invention, expression can be effected in wide variety of prokaryotic or eukaryotic cells.

[0169] Expressed in vitro, the protein, protein fragment, or protein fusion can thereafter be isolated, to be used, inter alia, as a standard in immunoassays specific for the proteins, or protein isoforms, of the present invention; to be used as a therapeutic agent, e.g., to be administered as passive replacement therapy in individuals deficient in the proteins of the present invention, or to be administered as a vaccine; to be used for in vitro production of specific antibody, the antibody thereafter to be used, e.g., as an analytical reagent for detection and quantitation of the proteins of the present invention or to be used as an immunotherapeutic agent.

[0170] The isolated nucleic acids of the present invention can also be used to drive in vivo expression of the proteins of the present invention. In vivo expression can be driven from a vector—typically a viral vector, often a vector based upon a replication incompetent retrovirus, an adenovirus, or an adeno-associated virus (AAV)—for purpose of gene therapy. In vivo expression can also be driven from signals endogenous to the nucleic acid or from a vector, often a plasmid vector, such as pVAX1 (Invitrogen, Carlsbad Calif., USA), for purpose of “naked” nucleic acid vaccination, as further described in U.S. Pat. Nos. 5,589,466; 5,679,647; 5,804,566; 5,830,877; 5,843,913; 5,880,104; 5,958,891; 5,985,847; 6,017,897; 6,110,898; 6,204,250, the disclosures of which are incorporated herein by reference in their entireties.

[0171] The nucleic acids of the present invention can also be used for antisense inhibition of transcription or translation. See Phillips (ed.), Antisense Technology, Part B, Methods in Enzymology Vol. 314, Academic Press, Inc. (1999) (ISBN: 012182215X); Phillips (ed.), Antisense Technology, Part A, Methods in Enzymology Vol. 313, Academic Press, Inc. (1999) (ISBN: 0121822141); Hartmann et al. (eds.), Manual of Antisense Methodology (Perspectives in Antisense Science), Kluwer Law International (1999) (ISBN: 079238539X); Stein et al. (eds.), Applied Antisense Oligonucleotide Technology, Wiley-Liss (cover (1998) (ISBN: 0471172790); Agrawal et al. (eds.), Antisense Research and Application, Springer-Verlag New York, Inc. (1998) (ISBN: 3540638334); Lichtenstein et al. (eds.), Antisense Technology: A Practical Approach, Vol. 185, Oxford University Press, INC. (1998) (ISBN: 0199635838); Gibson (ed.), Antisense and Ribozyme Methodology: Laboratory Companion, Chapman & Hall (1997) (ISBN: 3826100794); Chadwick et al. (eds.), Oligonucleotides as Therapeutic Agents—Symposium No. 209, John Wiley & Son Ltd (1997) (ISBN: 0471972797), the disclosures of which are incorporated herein by reference in their entireties.

[0172] Nucleic acids of the present invention, particularly cDNAs of the present invention, that encode full-length human HTPL protein isoforms, have additional, well-recognized, immediate, real world utility as commercial products of manufacture suitable for sale.

[0173] For example, Invitrogen Corp. (Carlsbad, Calif., USA), through its Research Genetics subsidiary, sells full length human cDNAs cloned into one of a selection of expression vectors as GeneStorm® expression-ready clones; utility is specific for the gene, since each gene is capable of being ordered separately and has a distinct catalogue number, and utility is substantial, each clone selling for $650.00 US. Similarly, Incyte Genomics (Palo Alto, Calif., USA) sells clones from public and proprietary sources in multi-well plates or Nucleic acids of the present invention that include genomic regions encoding the human HTPL protein, or portions thereof, have yet further utilities.

[0174] For example, genomic nucleic acids of the present invention can be used as amplification substrates, e.g. for preparation of genome-derived single exon probes of the present invention, as described above and in copending and commonly-owned U.S. patent application Ser. No. 09/864,761, filed May 23, 2001, Ser. No. 09/774,203, filed Jan. 29, 2001, and Ser. No. 09/632,366, filed Aug. 3, 2000, the disclosures of which are incorporated herein by reference in their entireties.

[0175] As another example, genomic nucleic acids of the present invention can be integrated non-homologously into the genome of somatic cells, e.g. CHO cells, COS cells, or 293 cells, with or without amplification of the insertional locus, in order, e.g., to create stable cell lines capable of producing the proteins of the present invention.

[0176] As another example, more fully described herein below, genomic nucleic acids of the present invention can be integrated nonhomologously into embryonic stem (ES) cells to create transgenic non-human animals capable of producing the proteins of the present invention.

[0177] Genomic nucleic acids of the present invention can also be used to target homologous recombination to the human HTPL locus. See, e.g., U.S. Pat. Nos. 6,187,305; 6,204,061; 5,631,153; 5,627,059; 5,487,992; 5,464,764; 5,614,396; 5,527,695 and 6,063,630; and Kmiec et al. (eds.), Gene Targeting Protocols, Vol. 133, Humana Press (2000) (ISBN: 0896033600); Joyner (ed.), Gene Targeting: A Practical Approach, Oxford University Press, Inc. (2000) (ISBN: 0199637938); Sedivy et al., Gene Targeting, Oxford University Press (1998) (ISBN: 071677013X); Tymms et al. (eds.), Gene Knockout Protocols, Humana Press (2000) (ISBN: 0896035727); Mak et al. (eds.), The Gene Knockout FactsBook, Vol. 2, Academic Press, Inc. (1998) (ISBN: 0124660444); Torres et al., Laboratory Protocols for Conditional Gene Targeting, Oxford University Press (1997) (ISBN: 019963677X); Vega (ed.), Gene Targeting, CRC Press, LLC (1994) (ISBN: 084938950X), the disclosures of which are incorporated herein by reference in their entireties.

[0178] Where the genomic region includes transcription regulatory elements, homologous recombination can be used to alter the expression of HTPL, both for purpose of in vitro production of HTPL protein from human cells, and for purpose of gene therapy. See, e.g., U.S. Pat. Nos. 5,981,214, 6,048,524; 5,272,071.

[0179] Fragments of the nucleic acids of the present invention smaller than those typically used for homologous recombination can also be used for targeted gene correction or alteration, possibly by cellular mechanisms different from those engaged during homologous recombination.

[0180] For example, partially duplexed RNA/DNA chimeras have been shown to have utility in targeted gene correction, U.S. Pat. Nos. 5,945,339, 5,888,983, 5,871,984, 5,795,972, 5,780,296, 5,760,012, 5,756,325, 5,731,181, the disclosures of which are incorporated herein by reference in their entireties. So too have small oligonucleotides fused to triplexing domains have been shown to have utility in targeted gene correction, Culver et al., “Correction of chromosomal point mutations in human cells with bifunctional oligonucleotides,” Nature Biotechnol. 17(10):989-93 (1999), as have oligonucleotides having modified terminal bases or modified terminal internucleoside bonds, Gamper et al., Nucl. Acids Res. 28(21):4332-9 (2000), the, disclosures of which are incorporated herein by reference.

[0181] The isolated nucleic acids of the present invention can also be used to provide the initial substrate for recombinant engineering of HTPL protein variants having desired phenotypic improvements. Such engineering includes, for example, site-directed mutagenesis, random mutagenesis with subsequent functional screening, and more elegant schemes for recombinant evolution of proteins, as are described, inter alia, in U.S. Pat. Nos. 6,180,406; 6,165,793; 6,117,679; and 6,096,548, the disclosures of which are incorporated herein by reference in their entireties.

[0182] Nucleic acids of the present invention can be obtained by using the labeled probes of the present invention to probe nucleic acid samples, such as genomic libraries, cDNA libraries, and mRNA samples, by standard techniques. Nucleic acids of the present invention can also be obtained by amplification, using the nucleic acid primers of the present invention, as further demonstrated in Example 1, herein below. Nucleic acids of the present invention of fewer than about 100 nt can also be synthesized chemically, typically by solid phase synthesis using commercially available automated synthesizers.

[0183] “Full Length” HTPL Nucleic Acids

[0184] In a first series of nucleic acid embodiments, the invention provides isolated nucleic acids that encode the entirety of the HTPL protein. As discussed above, the “full-length” nucleic acids of the present invention can be used, inter alia, to express full length HTPL protein. The full-length nucleic acids can also be used as nucleic acid probes; used as probes, the isolated nucleic acids of these embodiments will hybridize to HTPL.

[0185] In a first such embodiment, the invention provides an isolated nucleic acid comprising (i) the nucleotide sequence of SEQ ID NO: 1, or (ii) the complement of (i). SEQ ID NO: 1 presents the entire cDNA of HTPL-L, including the 5′ untranslated (UT) region and 3′ UT.

[0186] In a second embodiment, the invention provides an isolated nucleic acid comprising (i) the nucleotide sequence of SEQ ID NO: 2, (ii) a degenerate variant of the nucleotide sequence of SEQ ID NO: 2, or (iii) the complement of (i) or (ii). SEQ ID NO: 2 presents the open reading frame (ORF) from SEQ ID NO: 1.

[0187] In a third embodiment, the invention provides an isolated nucleic acid comprising (i) a nucleotide sequence that encodes a polypeptide with the amino acid sequence of SEQ ID NO: 3 or (ii) the complement of a nucleotide sequence that encodes a polypeptide with the amino acid sequence of SEQ ID NO: 3. SEQ ID NO: 3 provides the amino acid sequence of HTPL-L.

[0188] In a fourth embodiment, the invention provides an isolated nucleic acid having a nucleotide sequence that (i) encodes a polypeptide having the sequence of SEQ ID NO: 3, (ii) encodes a polypeptide having the sequence of SEQ ID NO: 3 with conservative amino acid substitutions, or (iii) that is the complement of (i) or (ii), where SEQ ID NO: 3 provides the amino acid sequence of HTPL-L.

[0189] In another such embodiment, the invention provides an isolated nucleic acid comprising (i) the nucleotide sequence of SEQ ID NO: 4, or (ii) the complement of (i). SEQ ID NO: 4 presents the entire cDNA of HTPL-S, including the 5′ untranslated (UT) region and 3′ UT.

[0190] In another embodiment, the invention provides an isolated nucleic acid comprising (i) the nucleotide sequence of SEQ ID NO: 5, (ii) a degenerate variant of the nucleotide sequence of SEQ ID NO: 5, or (iii) the complement of (i) or (ii). SEQ ID NO: 5 presents the open reading frame (ORF) from SEQ ID NO: 4.

[0191] In yet another embodiment, the invention provides an isolated nucleic acid comprising (i) a nucleotide sequence that encodes a polypeptide with the amino acid sequence of SEQ ID NO: 6 or (ii) the complement of a nucleotide sequence that encodes a polypeptide with the amino acid sequence of SEQ ID NO: 6. SEQ ID NO: 6 provides the amino acid sequence of HTPL-S.

[0192] In still another embodiment, the invention provides an isolated nucleic acid having a nucleotide sequence that (i) encodes a polypeptide having the sequence of SEQ ID NO: 6, (ii) encodes a polypeptide having the sequence of SEQ ID NO: 6 with conservative amino acid substitutions, or (iii) that is the complement of (i) or (ii), where SEQ ID NO: 6 provides the amino acid sequence of HTPL-S.

[0193] Selected Partial Nucleic Acids

[0194] In a second series of nucleic acid embodiments, the invention provides isolated nucleic acids that encode select portions of HTPL. As will be further discussed herein below, these “partial” nucleic acids can be used, inter alia, to express specific portions of the HTPL. These “partial” nucleic acids can also be used, inter alia, as nucleic probes.

[0195] In a first such embodiment, the invention provides an isolated nucleic acid comprising (i) the nucleotide sequence of SEQ ID NO: 7, (ii) a degenerate variant of SEQ ID NO: 9, or (iii) the complement of (i) or (ii), wherein the isolated nucleic acid is no more than about 100 kb in length, typically no more than about 75 kb in length, more typically no more than about 50 kb length. SEQ ID NO: 7 encodes a novel portion of HTPL-L. Often, the isolated nucleic acids of this embodiment are no more than about 25 kb in length, often no more than about 15 kb in length, and frequently no more than about 10 kb in length.

[0196] In another embodiment, the invention provides an isolated nucleic acid comprising (i) a nucleotide sequence that encodes SEQ ID NO: 10 or (ii) the complement of a nucleotide sequence that encodes SEQ ID NO: 10, wherein the isolated nucleic acid is no more than about 100 kb in length, typically no more than about 75 kb in length, frequently no more than about 50 kb in length. SEQ ID NO: 10 is the amino acid sequence encoded by the portion of HTPL-L not found in any EST fragments. Often, the isolated nucleic acids of this embodiment are no more than about 25 kb in length, often no more than about 15 kb in length, and frequently no more than about 10 kb in length.

[0197] In another embodiment, the invention provides an isolated nucleic acid comprising (i) a nucleotide sequence that encodes SEQ ID NO: 10, (ii) a nucleotide sequence that encodes SEQ ID NO: 10 with conservative substitutions, or (iii) the complement of (i) or (ii), wherein the isolated nucleic acid is no more than about 100 kb in length, typically no more than about 75 kb in length, and often no more than about 50 kb in length. Often, the isolated nucleic acids of this embodiment are no more than about 25 kb in length, often no more than about 15 kb in length, and frequently no more than about 10 kb in length.

[0198] In another such embodiment, the invention provides an isolated nucleic acid comprising (i) the nucleotide sequence of SEQ ID NO: 11, (ii) a degenerate variant of SEQ ID NO: 12, or (iii) the complement of (i) or (ii), wherein the isolated nucleic acid is no more than about 100 kb in length, typically no more than about 75 kb in length, more typically no more than about 50 kb length. SEQ ID NO: 11 encodes a novel portion of HTPL-L. Often, the isolated nucleic acids of this embodiment are no more than about 25 kb in length, often no more than about 15 kb in length, and frequently no more than about 10 kb in length.

[0199] In another embodiment, the invention provides an isolated nucleic acid comprising (i) a nucleotide sequence that encodes SEQ ID NO: 14 or (ii) the complement of a nucleotide sequence that encodes SEQ ID NO: 14, wherein the isolated nucleic acid is no more than about 100 kb in length, typically no more than about 75 kb in length, frequently no more than about 50 kb in length. SEQ ID NO: 14 is the amino acid sequence encoded by the portion of HTPL-L not found in any EST fragments. Often, the isolated nucleic acids of this embodiment are no more than about 25 kb in length, often no more than about 15 kb in length, and frequently no more than about 10 kb in length.

[0200] In another embodiment, the invention provides an isolated nucleic acid comprising (i) a nucleotide sequence that encodes SEQ ID NO: 14, (ii) a nucleotide sequence that encodes SEQ ID NO: 14 with conservative substitutions, or (iii) the complement of (i) or (ii), wherein the isolated nucleic acid is no more than about 100 kb in length, typically no more than about 75 kb in length, and often no more than about 50 kb in length. Often, the isolated nucleic acids of this embodiment are no more than about 25 kb in length, often no more than about 15 kb in length, and frequently no more than about 10 kb in length.

[0201] In another such embodiment, the invention provides an isolated nucleic acid comprising (i) the nucleotide sequence of SEQ ID NO: 4796, (ii) a degenerate variant of SEQ ID NO: 4798, or (iii) the complement of (i) or (ii), wherein the isolated nucleic acid is no more than about 100 kb in length, typically no more than about 75 kb in length, more typically no more than about 50 kb length. SEQ ID NO: 4796 encodes a novel portion of HTPL-S. Often, the isolated nucleic acids of this embodiment are no more than about 25 kb in length, often no more than about 15 kb in length, and frequently no more than about 10 kb in length.

[0202] In another embodiment, the invention provides an isolated nucleic acid comprising (i) a nucleotide sequence that encodes SEQ ID NO: 4799 or (ii) the complement of a nucleotide sequence that encodes SEQ ID NO: 4799, wherein the isolated nucleic acid is no more than about 100 kb in length, typically no more than about 75 kb in length, frequently no more than about 50 kb in length. SEQ ID NO: 4799 is the amino acid sequence encoded by the portion of HTPL-S not found in any EST fragments. Often, the isolated nucleic acids of this embodiment are no more than about 25 kb in length, often no more than about 15 kb in length, and frequently no more than about 10 kb in length.

[0203] In another embodiment, the invention provides an isolated nucleic acid comprising (i) a nucleotide sequence that encodes SEQ ID NO: 4799, (ii) a nucleotide sequence that encodes SEQ ID NO: 4799 with conservative substitutions, or (iii) the complement of (i) or (ii), wherein the isolated nucleic acid is no more than about 100 kb in length, typically no more than about 75 kb in length, and often no more than about 50 kb in length. Often, the isolated nucleic acids of this embodiment are no more than about 25 kb in length, often no more than about 15 kb in length, and frequently no more than about 10 kb in length.

[0204] In another such embodiment, the invention provides an isolated nucleic acid comprising (i) the nucleotide sequence of SEQ ID NO: 4800, or (ii) the complement of (i), wherein the isolated nucleic acid is no more than about 100 kb in length, typically no more than about 75 kb in length, more typically no more than about 50 kb length. SEQ ID NO: 4800 encodes a novel portion of HTPL-S. Often, the isolated nucleic acids of this embodiment are no more than about 25 kb in length, often no more than about 15 kb in length, and frequently no more than about 10 kb in length.

[0205] Cross-Hybridizing Nucleic Acids

[0206] In another series of nucleic acid embodiments, the invention provides isolated nucleic acids that hybridize to various of the HTPL nucleic acids of the present invention. These cross-hybridizing nucleic acids can be used, inter alia, as probes for, and to drive expression of, proteins that are related to HTPL of the present invention as further isoforms, homologues, paralogues, or orthologues.

[0207] In a first embodiment, the invention provides an isolated nucleic acid comprising a sequence that hybridizes under high stringency conditions to a probe the nucleotide sequence of which consists of at least 17 nt, 18, 19, 20, 21, 22, 23, 24, 25, 30, 40, or 50 nt of SEQ ID NO: 7 or the complement of SEQ ID NO: 7, wherein the isolated nucleic acid is no more than about 100 kb in length, typically no more than about 75 kb in length, and often no more than about 50 kb in length. Often, the isolated nucleic acids of this embodiment are no more than about 25 kb in length, often no more than about 15 kb in length, and frequently no more than about 10 kb in length.

[0208] In a further embodiment, the invention provides an isolated nucleic acid comprising a sequence that hybridizes under moderate stringency conditions to a probe the nucleotide sequence of which consists of at least 17 nt, 18, 19, 20, 21, 22, 23, 24, 25, 30, 40, or 50 nt of SEQ ID NO: 7 or the complement of SEQ ID NO: 7, wherein the isolated nucleic acid is no more than about 100 kb in length, typically no more than about 75 kb in length, and often no more than about 50 kb in length. Often, the isolated nucleic acids of this embodiment are no more than about 25 kb in length, often no more than about 15 kb in length, and frequently no more than about 10 kb in length.

[0209] In a further embodiment, the invention provides an isolated nucleic acid comprising a sequence that hybridizes under high stringency conditions to a hybridization probe the nucleotide sequence of which (i) encodes a polypeptide having the sequence of SEQ ID NO: 10, (ii) encodes a polypeptide having the sequence of SEQ ID NO: 10 with conservative amino acid substitutions, or (iii) is the complement of (i) or (ii), wherein the isolated nucleic acid is no more than about 100 kb in length, typically no more than about 75 kb in length, and often no more than about 50 kb in length. Often, the isolated nucleic acids of this embodiment are no more than about 25 kb in length, often no more than about 15 kb in length, and frequently no more than about 10 kb in length.

[0210] In another embodiment, the invention provides an isolated nucleic acid comprising a sequence that hybridizes under high stringency conditions to a probe the nucleotide sequence of which consists of at least 17 nt, 18, 19, 20, 21, 22, 23, 24, 25, 30, 40, or 50 nt of SEQ ID NO: 11 or the complement of SEQ ID NO: 11, wherein the isolated nucleic acid is no more than about 100 kb in length, typically no more than about 75 kb in length, and often no more than about 50 kb in length. Often, the isolated nucleic acids of this embodiment are no more than about 25 kb in length, often no more than about 15 kb in length, and frequently no more than about 10 kb in length.

[0211] In a further embodiment, the invention provides an isolated nucleic acid comprising a sequence that hybridizes under moderate stringency conditions to a probe the nucleotide sequence of which consists of at least 17 nt, 18, 19, 20, 21, 22, 23, 24, 25, 30, 40, or 50 nt of SEQ ID NO: 11 or the complement of SEQ ID NO: 11, wherein the isolated nucleic acid is no more than about 100 kb in length, typically no more than about 75 kb in length, and often no more than about 50 kb in length. Often, the isolated nucleic acids of this embodiment are no more than about 25 kb in length, often no more than about 15 kb in length, and frequently no more than about 10 kb in length.

[0212] In a further embodiment, the invention provides an isolated nucleic acid comprising a sequence that hybridizes under high stringency conditions to a hybridization probe the nucleotide sequence of which (i) encodes a polypeptide having the sequence of SEQ ID NO: 14, (ii) encodes a polypeptide having the sequence of SEQ ID NO: 14 with conservative amino acid substitutions, or (iii) is the complement of (i) or (ii), wherein the isolated nucleic acid is no more than about 100 kb in length, typically no more than about 75 kb in length, and often no more than about 50 kb in length. Often, the isolated nucleic acids of this embodiment are no more than about 25 kb in length, often no more than about 15 kb in length, and frequently no more than about 10 kb in length.

[0213] In another embodiment, the invention provides an isolated nucleic acid comprising a sequence that hybridizes under high stringency conditions to a probe the nucleotide sequence of which consists of at least 17 nt, 18, 19, 20, 21, 22, 23, 24, 25, 30, 40, or 50 nt of SEQ ID NO: 4796 or the complement of SEQ ID NO: 4796, wherein the isolated nucleic acid is no more than about 100 kb in length, typically no more than about 75 kb in length, and often no more than about 50 kb in length. Often, the isolated nucleic acids of this embodiment are no more than about 25 kb in length, often no more than about 15 kb in length, and frequently no more than about 10 kb in length.

[0214] In a further embodiment, the invention provides an isolated nucleic acid comprising a sequence that hybridizes under moderate stringency conditions to a probe the nucleotide sequence of which consists of at least 17 nt, 18, 19, 20, 21, 22, 23, 24, 25, 30, 40, or 50 nt of SEQ ID NO: 4796 or the complement of SEQ ID NO: 4796, wherein the isolated nucleic acid is no more than about 100 kb in length, typically no more than about 75 kb in length, and often no more than about 50 kb in length. Often, the isolated nucleic acids of this embodiment are no more than about 25 kb in length, often no more than about 15 kb in length, and frequently no more than about 10 kb in length.

[0215] In a further embodiment, the invention provides an isolated nucleic acid comprising a sequence that hybridizes under high stringency conditions to a hybridization probe the nucleotide sequence of which (i) encodes a polypeptide having the sequence of SEQ ID NO: 4799, (ii) encodes a polypeptide having the sequence of SEQ ID NO: 4799 with conservative amino acid substitutions, or (iii) is the complement of (i) or (ii), wherein the isolated nucleic acid is no more than about 100 kb in length, typically no more than about 75 kb in length, and often no more than about 50 kb in length. Often, the isolated nucleic acids of this embodiment are no more than about 25 kb in length, often no more than about 15 kb in length, and frequently no more than about 10 kb in length.

[0216] In another embodiment, the invention provides an isolated nucleic acid comprising a sequence that hybridizes under high stringency conditions to a probe the nucleotide sequence of which consists of at least 17 nt, 18, 19, 20, 21, 22, 23, 24, 25, 30, 40, or 50 nt of SEQ ID NO: 4800 or the complement of SEQ ID NO: 4800, wherein the isolated nucleic acid is no more than about 100 kb in length, typically no more than about 75 kb in length, and often no more than about 50 kb in length. Often, the isolated nucleic acids of this embodiment are no more than about 25 kb in length, often no more than about 15 kb in length, and frequently no more than about 10 kb in length.

[0217] In a further embodiment, the invention provides an isolated nucleic acid comprising a sequence that hybridizes under moderate stringency conditions to a probe the nucleotide sequence of which consists of at least 17 nt, 18, 19, 20, 21, 22, 23, 24, 25, 30, 40, or 50 nt of SEQ ID NO: 4800 or the complement of SEQ ID NO: 4800, wherein the isolated nucleic acid is no more than about 100 kb in length, typically no more than about 75 kb in length, and often no more than about 50 kb in length. Often, the isolated nucleic acids of this embodiment are no more than about 25 kb in length, often no more than about 15 kb in length, and frequently no more than about 10 kb in length.

[0218] Particularly Useful Nucleic Acids

[0219] Particularly useful among the above-described nucleic acids are those that are expressed, or the complement of which are expressed, in testis, as well as adrenal, adult and fetal liver, bone marrow, brain, kidney, lung, placenta, prostate, skeletal muscle and colon.

[0220] Also particularly useful among the above-described nucleic acids are those that encode, or the complement of which encode, a membrane protein functioning in the hedgehog signaling pathway, mutations of which cause male sterility or cancer.

[0221] Other particularly useful embodiments of the nucleic acids above-described are those that encode, or the complement of which encode, a polypeptide having a Patched motif, or having a Sterol-sensing domain, or having at least one transmembrane domain, especially those having a plurality of transmembrane domains, particularly those having twelve (for HTPL-L) or seven (for HTPL-S) transmembrane domains in tandem.

[0222] Nucleic Acid Fragments

[0223] In another series of nucleic acid embodiments, the invention provides fragments of various of the isolated nucleic acids of the present invention which prove useful, inter alia, as nucleic acid probes, as amplification primers, and to direct expression or synthesis of epitopic or immunogenic protein fragments.

[0224] In a first embodiment, the invention provides an isolated nucleic acid comprising at least 17 nucleotides, 18 nucleotides, 20 nucleotides, 24 nucleotides, or 25 nucleotides of (i) SEQ ID NO: 7, (ii) a degenerate variant of SEQ ID NO: 9, or (iii) the complement of (i) or (ii), wherein the isolated nucleic acid is no more than about 100 kb in length, typically no more than about 75 kb in length, more typically no more than about 50 kb in length. Often, the isolated nucleic acids of this embodiment are no more than about 25 kb in length, often no more than about 15 kb in length, and frequently no more than about 10 kb in length.

[0225] The invention also provides an isolated nucleic acid comprising (i) a nucleotide sequence that encodes a peptide of at least 8 contiguous amino acids of SEQ ID NO: 10, (ii) a nucleotide sequence that encodes a peptide of at least 15 contiguous amino acids of SEQ ID NO: 10, or (iii) the complement of (i) or (ii), wherein the isolated nucleic acid is no more than about 100 kb in length, typically no more than about 75 kb in length, more typically no more than about 50 kb in length. Often, the isolated nucleic acids of this embodiment are no more than about 25 kb in length, often no more than about 15 kb in length, and frequently no more than about 10 kb in length.

[0226] The invention also provides an isolated nucleic acid comprising a nucleotide sequence that encodes (i) a polypeptide having the sequence of at least 8 contiguous amino acids of SEQ ID NO: 10 with conservative amino acid substitutions, (ii) a polypeptide having the sequence of at least 15 contiguous amino acids of SEQ ID NO: 10 with conservative amino acid substitutions, (iii) a polypeptide having the sequence of at least 8 contiguous amino acids of SEQ ID NO: 10 with moderately conservative substitutions, (iv) a polypeptide having the sequence of at least 15 congiuous amino acids of SEQ ID NO: 10 with moderately conservative substitutions, or (v) the complement of any of (i)-(iv), wherein the isolated nucleic acid is no more than about 100 kb in length, typically no more than about 75 kb in length, more typically no more than about 50 kb in length. Often, the isolated nucleic acids of this embodiment are no more than about 25 kb in length, often no more than about 15 kb in length, and frequently no more than about 10 kb in length.

[0227] In another embodiment, the invention provides an isolated nucleic acid comprising at least 17 nucleotides, 18 nucleotides, 20 nucleotides, 24 nucleotides, or 25 nucleotides of (i) SEQ ID NO: 11, (ii) a degenerate variant of SEQ ID NO: 12, or (iii) the complement of (i) or (ii), wherein the isolated nucleic acid is no more than about 100 kb in length, typically no more than about 75 kb in length, more typically no more than about 50 kb in length. Often, the isolated nucleic acids of this embodiment are no more than about 25 kb in length, often no more than about 15 kb in length, and frequently no more than about 10 kb in length.

[0228] The invention also provides an isolated nucleic acid comprising (i) a nucleotide sequence that encodes a peptide of at least 8 contiguous amino acids of SEQ ID NO: 14, (ii) a nucleotide sequence that encodes a peptide of at least 15 contiguous amino acids of SEQ ID NO: 14, or (iii) the complement of (i) or (ii), wherein the isolated nucleic acid is no more than about 100 kb in length, typically no more than about 75 kb in length, more typically no more than about 50 kb in length. Often, the isolated nucleic acids of this embodiment are no more than about 25 kb in length, often no more than about 15 kb in length, and frequently no more than about 10 kb in length.

[0229] The invention also provides an isolated nucleic acid comprising a nucleotide sequence that encodes (i) a polypeptide having the sequence of at least 8 contiguous amino acids of SEQ ID NO: 14 with conservative amino acid substitutions, (ii) a polypeptide having the sequence of at least 15 contiguous amino acids of SEQ ID NO: 14 with conservative amino acid substitutions, (iii) a polypeptide having the sequence of at least 8 contiguous amino acids of SEQ ID NO: 14 with moderately conservative substitutions, (iv) a polypeptide having the sequence of at least 15 contiguous amino acids of SEQ ID NO: 14 with moderately conservative substitutions, or (v) the complement of any of (i)-(iv), wherein the isolated nucleic acid is no more than about 100 kb in length, typically no more than about 75 kb in length, more typically no more than about 50 kb in length. Often, the isolated nucleic acids of this embodiment are no more than about 25 kb in length, often no more than about 15 kb in length, and frequently no more than about 10 kb in length.

[0230] In another embodiment, the invention provides an isolated nucleic acid comprising at least 17 nucleotides, 18 nucleotides, 20 nucleotides, 24 nucleotides, or 25 nucleotides of (i) SEQ ID NO: 4796, (ii) a degenerate variant of SEQ ID NO: 4798, or (iii) the complement of (i) or (ii), wherein the isolated nucleic acid is no more than about 100 kb in length, typically no more than about 75 kb in length, more typically no more than about 50 kb in length. Often, the isolated nucleic acids of this embodiment are no more than about 25 kb in length, often no more than about 15 kb in length, and frequently no more than about 10 kb in length.

[0231] The invention also provides an isolated nucleic acid comprising (i) a nucleotide sequence that encodes a peptide of at least 8 contiguous amino acids of SEQ ID NO: 4799, (ii) a nucleotide sequence that encodes a peptide of at least 15 contiguous amino acids of SEQ ID NO: 4799, or (iii) the complement of (i) or (ii), wherein the isolated nucleic acid is no more than about 100 kb in length, typically no more than about 75 kb in length, more typically no more than about 50 kb in length. Often, the isolated nucleic acids of this embodiment are no more than about 25 kb in length, often no more than about 15 kb in length, and frequently no more than about 10 kb in length.

[0232] The invention also provides an isolated nucleic acid comprising a nucleotide sequence that encodes (i) a polypeptide having the sequence of at least 8 contiguous amino acids of SEQ ID NO: 4799 with conservative amino acid substitutions, (ii) a polypeptide having the sequence of at least 15 contiguous amino acids of SEQ ID NO: 4799 with conservative amino acid substitutions, (iii) a polypeptide having the sequence of at least 8 contiguous amino acids of SEQ ID NO: 4799 with moderately conservative substitutions, (iv) a polypeptide having the sequence of at least 15 contiguous amino acids of SEQ ID NO: 4799 with moderately conservative substitutions, or (v) the complement of any of (i)-(iv), wherein the isolated nucleic acid is no more than about 100 kb in length, typically no more than about 75 kb in length, more typically no more than about 50 kb in length. Often, the isolated nucleic acids of this embodiment are no more than about 25 kb in length, often no more than about 15 kb in length, and frequently no more than about 10 kb in length.

[0233] In another embodiment, the invention provides an isolated nucleic acid comprising at least 17 nucleotides, 18 nucleotides, 20 nucleotides, 24 nucleotides, or 25 nucleotides of (i) SEQ ID NO: 4800, or (ii) the complement of (i), wherein the isolated nucleic acid is no more than about 100 kb in length, typically no more than about 75 kb in length, more typically no more than about 50 kb in length. Often, the isolated nucleic acids of this embodiment are no more than about 25 kb in length, often no more than about 15 kb in length, and frequently no more than about 10 kb in length.

[0234] Single Exon Probes

[0235] The invention further provides genome-derived single exon probes having portions of no more than one exon of the HTPL gene. As further described in commonly owned and copending U.S. patent application Ser. No. 09/632,366, filed Aug. 3, 2000 (“Methods and Apparatus for High Throughput Detection and Characterization of alternatively Spliced Genes”), the disclosure of which is incorporated herein by reference in its entirety, such single exon probes have particular utility in identifying and characterizing splice variants. In particular, such single exon probes are useful for identifying and discriminating the expression of distinct isoforms of HTPL.

[0236] In a first embodiment, the invention provides an isolated nucleic acid comprising a nucleotide sequence of no more than one portion of SEQ ID NOs: 15-18 or the complement of SEQ ID NOs: 15-18, wherein the portion comprises at least 17 contiguous nucleotides, 18 contiguous nucleotides, 20 contiguous nucleotides, 24 contiguous nucleotides, 25 contiguous nucleotides, or 50 contiguous nucleotides of any one of SEQ ID NOs: 15-18, or their complement. In a further embodiment, the exonic portion comprises the entirety of the referenced SEQ ID NO: or its complement.

[0237] In other embodiments, the invention provides isolated single exon probes having the nucleotide sequence of any one of SEQ ID NOs: 19-22.

[0238] Transcription Control Nucleic Acids

[0239] In another aspect, the present invention provides genome-derived isolated nucleic acids that include nucleic acid sequence elements that control transcription of the HTPL gene. These nucleic acids can be used, inter alia, to drive expression of heterologous coding regions in recombinant constructs, thus conferring upon such heterologous coding regions the expression pattern of the native HTPL gene. These nucleic acids can also be used, conversely, to target heterologous transcription control elements to the HTPL genomic locus, altering the expression pattern of the HTPL gene itself.

[0240] In a first such embodiment, the invention provides an isolated nucleic acid comprising the nucleotide sequence of SEQ ID NO: 23 or its complement, wherein the isolated nucleic acid is no more than about 100 kb in length, typically no more than about 75 kb in length, more typically no more than about 50 kb in length. Often, the isolated nucleic acids of this embodiment are no more than about 25 kb in length, often no more than about 15 kb in length, and frequently no more than about 10 kb in length.

[0241] In another embodiment, the invention provides an isolated nucleic acid comprising at least 17, 18, 20, 24, or 25 nucleotides of the sequence of SEQ ID NO: 23 or its complement, wherein the isolated nucleic acid is no more than about 100 kb in length, typically no more than about 75 kb in length, more typically no more than about 50 kb in length. Often, the isolated nucleic acids of this embodiment are no more than about 25 kb in length, often no more than about 15 kb in length, and frequently no more than about 10 kb in length.

[0242] Vectors and Host Cells

[0243] In another aspect, the present invention provides vectors that comprise one or more of the isolated nucleic acids of the present invention, and host cells in which such vectors have been introduced.

[0244] The vectors can be used, inter alia, for propagating the nucleic acids of the present invention in host cells (cloning vectors), for shuttling the nucleic acids of the present invention between host cells derived from disparate organisms (shuttle vectors), for inserting the nucleic acids of the present invention into host cell chromosomes (insertion vectors), for expressing sense or antisense RNA transcripts of the nucleic acids of the present invention in vitro or within a host cell, and for expressing polypeptides encoded by the nucleic acids of the present invention, alone or as fusions to heterologous polypeptides. Vectors of the present invention will often be suitable for several such uses.

[0245] Vectors are by now well-known in the art, and are described, inter alia, in Jones et al. (eds.), Vectors: Cloning Applications: Essential Techniques (Essential Techniques Series), John Wiley & Son Ltd 1998 (ISBN: 047196266X); Jones et al. (eds.), Vectors: Expression Systems: Essential Techniques (Essential Techniques Series), John Wiley & Son Ltd, 1998 (ISBN: 0471962678); Gacesa et al., Vectors: Essential Data, John Wiley & Sons, 1995 (ISBN: 0471948411); Cid-Arregui (eds.), Viral Vectors: Basic Science and Gene Therapy, Eaton Publishing Co., 2000 (ISBN: 188129935X); Sambrook et al., Molecular Cloning: A Laboratory Manual (3^{rd} ed.), Cold Spring Harbor Laboratory Press, 2001 (ISBN: 0879695773); Ausubel et al. (eds.), Short Protocols in Molecular Biology: A Compendium of Methods from Current Protocols in Molecular Biology (4^{th} ed.), John Wiley & Sons, 1999 (ISBN: 047132938X), the disclosures of which are incorporated herein by reference in their entireties. Furthermore, an enormous variety of vectors are available commercially. Use of existing vectors and modifications thereof being well within the skill in the art, only basic features need be described here.

[0246] Typically, vectors are derived from virus, plasmid, prokaryotic or eukaryotic chromosomal elements, or some combination thereof, and include at least one origin of replication, at least one site for insertion of heterologous nucleic acid, typically in the form of a polylinker with multiple, tightly clustered, single cutting restriction sites, and at least one selectable marker, although some integrative vectors will lack an origin that is functional in the host to be chromosomally modified, and some vectors will lack selectable markers. Vectors of the present invention will further include at least one nucleic acid of the present invention inserted into the vector in at least one location.

[0247] Where present, the origin of replication and selectable markers are chosen based upon the desired host cell or host cells; the host cells, in turn, are selected based upon the desired application.

[0248] For example, prokaryotic cells, typically E. coli, are typically chosen for cloning. In such case, vector replication is predicated on the replication strategies of coliform-infecting phage—such as phage lambda, M13, T7, T3 and P1—or on the replication origin of autonomously replicating episomes, notably the ColE1 plasmid and later derivatives, including pBR322 and the pUC series plasmids. Where E. coli is used as host, selectable markers are, analogously, chosen for selectivity in gram negative bacteria: e.g., typical markers confer resistance to antibiotics, such as ampicillin, tetracycline, chloramphenicol, kanamycin, streptomycin, zeocin; auxotrophic markers can also be used.

[0249] As another example, yeast cells, typically S. cerevisiae, are chosen, inter alia, for eukaryotic genetic studies, due to the ease of targeting genetic changes by homologous recombination and to the ready ability to complement genetic defects using recombinantly expressed proteins, for identification of interacting protein components, e.g. through use of a two-hybrid system, and for protein expression. Vectors of the present invention for use in yeast will typically, but not invariably, contain an origin of replication suitable for use in yeast and a selectable marker that is functional in yeast.

[0250] Integrative YIp vectors do not replicate autonomously, but integrate, typically in single copy, into the yeast genome at low frequencies and thus replicate as part of the host cell chromosome; these vectors lack an origin of replication that is functional in yeast, although they typically have at least one origin of replication suitable for propagation of the vector in bacterial cells. YEp vectors, in contrast, replicate episomally and autonomously due to presence of the yeast 2 micron plasmid origin (2 μn ori). The YCp yeast centromere plasmid vectors are autonomously replicating vectors containing centromere sequences, CEN, and autonomously replicating sequences, ARS; the ARS sequences are believed to correspond to the natural replication origins of yeast chromosomes. YACs are based on yeast linear plasmids, denoted YLp, containing homologous or heterologous DNA sequences that function as telomeres (TEL) in vivo, as well as containing yeast ARS (origins of replication) and CEN (centromeres) segments.

[0251] Selectable markers in yeast vectors include a variety of auxotrophic markers, the most common of which are (in Saccharomyces cerevisiae) URA3, HIS3, LEU2, TRP1 and LYS2, which complement specific auxotrophic mutations, such as ura3-52, his3-D1, leu2-D1, trp1-D1 and lys2-201. The URA3 and LYS2 yeast genes further permit negative selection based on specific inhibitors, 5-fluoro-orotic acid (FOA) and α-aminoadipic acid (ΔAA), respectively, that prevent growth of the prototrophic strains but allows growth of the ura3 and lys2 mutants, respectively. Other selectable markers confer resistance to, e.g., zeocin.

[0252] As yet another example, insect cells are often chosen for high efficiency protein expression. Where the host cells are from Spodoptera frugiperda—e.g., Sf9 and Sf21 cell lines, and expresSF™ cells (Protein Sciences Corp., Meriden, Conn., USA)—the vector replicative strategy is typically based upon the baculovirus life cycle. Typically, baculovirus transfer vectors are used to replace the wild-type AcMNPV polyhedrin gene with a heterologous gene of interest. Sequences that flank the polyhedrin gene in the wild-type genome are positioned 5′ and 3′ of the expression cassette on the transfer vectors. Following cotransfection with AcMNPV DNA, a homologous recombination event occurs between these sequences resulting in a recombinant virus carrying the gene of interest and the polyhedrin or p10 promoter. Selection can be based upon visual screening for lacZ fusion activity.

[0253] As yet another example, mammalian cells are often chosen for expression of proteins intended as pharmaceutical agents, and are also chosen as host cells for screening of potential agonist and antagonists of a protein or a physiological pathway.

[0254] Where mammalian cells are chosen as host cells, vectors intended for autonomous extrachromosomal replication will typically include a viral origin, such as the SV40 origin (for replication in cell lines expressing the large T-antigen, such as COS1 and COS7 cells), the papillomavirus origin, or the EBV origin for long term episomal replication (for use, e.g., in 293-EBNA cells, which constitutively express the EBV EBNA-1 gene product and adenovirus E1A). Vectors intended for integration, and thus replication as part of the mammalian chromosome, can, but need not, include an origin of replication functional in mammalian cells, such as the SV40 origin. Vectors based upon viruses, such as adenovirus, adeno-associated virus, vaccinia virus, and various mammalian retroviruses, will typically replicate according to the viral replicative strategy.

[0255] Selectable markers for use in mammalian cells include resistance to neomycin (G418), blasticidin, hygromycin and to zeocin, and selection based upon the purine salvage pathway using HAT medium.

[0256] Plant cells can also be used for expression, with the vector replicon typically derived from a plant virus (e.g., cauliflower mosaic virus, CaMV; tobacco mosaic virus, TMV) and selectable markers chosen for suitability in plants.

[0257] For propagation of nucleic acids of the present invention that are larger than can readily be accomodated in vectors derived from plasmids or virus, the invention further provides artificial chromosomes—BACs, YACs, PACs, and HACs—that comprise HTPL nucleic acids, often genomic nucleic acids.

[0258] The BAC system is based on the well-characterized E. coli F-factor, a low copy plasmid that exists in a supercoiled circular form in host cells. The structural features of the F-factor allow stable maintenance of individual human DNA clones as well as easy manipulation of the cloned DNA. See Shizuya et al., Keio J. Med. 50(1):26-30 (2001); Shizuya et al., Proc. Natl. Acad. Sci. USA 89(18):8794-7 (1992).

[0259] YACs are based on yeast linear plasmids, denoted YLp, containing homologous or heterologous DNA sequences that function as telomeres (TEL) in vivo, as well as containing yeast ARS (origins of replication) and CEN (centromeres) segments.

[0260] HACs are human artifical chromosomes. Kuroiwa et al., Nature Biotechnol. 18(10):1086-90 (2000); Henning et al., Proc. Natl. Acad. Sci. USA 96(2):592-7 (1999); Harrington et al., Nature Genet. 15(4):345-55 (1997). In one version, long synthetic arrays of alpha satellite DNA are combined with telomeric DNA and genomic DNA to generate linear microchromosomes that are mitotically and cytogenetically stable in the absence of selection.

[0261] PACs are P1-derived artificial chromosomes. Sternberg, Proc. Natl. Acad. Sci. USA 87(1):103-7 (1990); Sternberg et al., New Biol. 2(2):151-62 (1990); Pierce et al., Proc. Natl. Acad. Sci. USA 89(6):2056-60 (1992).

[0262] Vectors of the present invention will also often include elements that permit in vitro transcription of RNA from the inserted heterologous nucleic acid. Such vectors typically include a phage promoter, such as that from T7, T3, or SP6, flanking the nucleic acid insert. Often two different such promoters flank the inserted nucleic acid, permitting separate in vitro production of both sense and antisense strands.

[0263] Expression vectors of the present invention—that is, those vectors that will drive expression of polypeptides from the inserted heterologous nucleic acid—will often include a variety of other genetic elements operatively linked to the protein-encoding heterologous nucleic acid insert, typically genetic elements that drive transcription, such as promoters and enhancer elements, those that facilitate RNA processing, such as transcription termination and/or polyadenylation signals, and those that facilitate translation, such as ribosomal consensus sequences.

[0264] For example, vectors for expressing proteins of the present invention in prokaryotic cells, typically E. coli, will include a promoter, often a phage promoter, such as phage lambda pL promoter, the trc promoter, a hybrid derived from the trp and lac promoters, the bacteriophage T7 promoter (in E. coli cells engineered to express the T7 polymerase), or the araBAD operon. Often, such prokaryotic expression vectors will further include transcription terminators, such as the aspA terminator, and elements that facilitate translation, such as a consensus ribosome binding site and translation termination codon, Schomer et al., Proc. Natl. Acad. Sci. USA 83:8506-8510 (1986).

[0265] As another example, vectors for expressing proteins of the present invention in yeast cells, typically S. cerevisiae, will include a yeast promoter, such as the CYC1 promoter, the GAL1 promoter, ADH1 promoter, or the GPD promoter, and will typically have elements that facilitate transcription termination, such as the transcription termination signals from the CYC1 or ADH1 gene.

[0266] As another example, vectors for expressing proteins of the present invention in mammalian cells will include a promoter active in mammalian cells. Such promoters are often drawn from mammalian viruses—such as the enhancer-promoter sequences from the immediate early gene of the human cytomegalovirus (CMV), the enhancer-promoter sequences from the Rous sarcoma virus long terminal repeat (RSV LTR), and the enhancer-promoter from SV40. Often, expression is enhanced by incorporation of polyadenylation sites, such as the late SV40 polyadenylation site and the polyadenylation signal and transcription termination sequences from the bovine growth hormone (BGH) gene, and ribosome binding sites. Furthermore, vectors can include introns, such as intron II of rabbit β-globin gene and the SV40 splice elements.

[0267] Vector-drive protein expression can be constitutive or inducible.

[0268] Inducible vectors include either naturally inducible promoters, such as the trc promoter, which is regulated by the lac operon, and the pL promoter, which is regulated by tryptophan, the MMTV-LTR promoter, which is inducible by dexamethasone, or can contain synthetic promoters and/or additional elements that confer inducible control on adjacent promoters. Examples of inducible synthetic promoters are the hybrid Plac/ara-1 promoter and the PLtetO-1 promoter. The PltetO-1 promoter takes advantage of the high expression levels from the PL promoter of phage lambda, but replaces the lambda repressor sites with two copies of operator 2 of the Tn10 tetracycline resistance operon, causing this promoter to be tightly repressed by the Tet repressor protein and induced in response to tetracycline (Tc) and Tc derivatives such as anhydrotetracycline.

[0269] As another example of inducible elements, hormone response elements, such as the glucocorticoid response element (GRE) and the estrogen response element (ERE), can confer hormone inducibility where vectors are used for expression in cells having the respective hormone receptors. To reduce background levels of expression, elements responsive to ecdysone, an insect hormone, can be used instead, with coexpression of the ecdysone receptor.

[0270] Expression vectors can be designed to fuse the expressed polypeptide to small protein tags that facilitate purification and/or visualization.

[0271] For example, proteins of the present invention can be expressed with a polyhistidine tag that facilitates purification of the fusion protein by immobilized metal affinity chromatography, for example/using NiNTA resin (Qiagen Inc., Valencia, Calif., USA) or TALON™ resin (cobalt immobilized affinity chromatography medium, Clontech Labs, Palo Alto, Calif., USA). As another example, the fusion protein can include a chitin-binding tag and self-excising intein, permitting chitin-based purification with self-removal of the fused tag (IMPACT™ system, New England Biolabs, Inc., Beverley, Mass., USA). Alternatively, the fusion protein can include a calmodulin-binding peptide tag, permitting purification by calmodulin affinity resin (Stratagene, La Jolla, Calif., USA), or a specifically excisable fragment of the biotin carboxylase carrier protein, permitting purification of in vivo biotinylated protein using an avidin resin and subsequent tag removal (Promega, Madison, Wis., USA). As another useful alternative, the proteins of the present invention can be expressed as a fusion to glutathione-S-transferase, the affinity and specificity of binding to glutathione permitting purification using glutathione affinity resins, such as Glutathione-Superflow Resin (Clontech Laboratories, Palo Alto, Calif., USA), with subsequent elution with free glutathione.

[0272] Other tags include, for example, the Xpress epitope, detectable by anti-Xpress antibody (Invitrogen, Carlsbad, Calif., USA), a myc tag, detectable by anti-myc tag antibody, the V5 epitope, detectable by anti-V5 antibody (Invitrogen, Carlsbad, Calif., USA), FLAG® epitope, detectable by anti-FLAG® antibody (Stratagene, La Jolla, Calif., USA), and the HA epitope.

[0273] For secretion of expressed proteins, vectors can include appropriate sequences that encode secretion signals, such as leader peptides. For example, the pSecTag2 vectors (Invitrogen, Carlsbad, Calif., USA) are 5.2 kb mammalian expression vectors that carry the secretion signal from the V-J2-C region of the mouse Ig kappa-chain for efficient secretion of recombinant proteins from a variety of mammalian cell lines.

[0274] Expression vectors can also be designed to fuse proteins encoded by the heterologous nucleic acid insert to polypeptides larger than purification and/or identification tags. Useful protein fusions include those that permit display of the encoded protein on the surface of a phage or cell, fusions to intrinsically fluorescent proteins, such as those that have a green fluorescent protein (GFP)-like chromophore, fusions to the IgG Fc region, and fusions for use in two hybrid systems.

[0275] Vectors for phage display fuse the encoded polypeptide to, e.g., the gene III protein (pIII) or gene VIII protein (pVIII) for display on the surface of filamentous phage, such as M13. See Barbas et al., Phage Display: A Laboratory Manual, Cold Spring Harbor Laboratory Press (2001) (ISBN 0-87969-546-3); Kay et al. (eds.), Phage Display of Peptides and Proteins: A Laboratory Manual, San Diego: Academic Press, Inc., 1996; Abelson et al. (eds.), Combinatorial Chemistry, Methods in Enzymology vol. 267, Academic Press (May 1996).

[0276] Vectors for yeast display, e.g. the pYD1 yeast display vector (Invitrogen, Carlsbad, Calif., USA), use the α-agglutinin yeast adhesion receptor to display recombinant protein on the surface of S. cerevisiae. Vectors for mammalian display, e.g., the pDisplay™ vector (Invitrogen, Carlsbad, Calif., USA), target recombinant proteins using an N-terminal cell surface targeting signal and a C-terminal transmembrane anchoring domain of platelet derived growth factor receptor.

[0277] A wide variety of vectors now exist that fuse proteins encoded by heterologous nucleic acids to the chromophore of the substrate-independent, intrinsically fluorescent green fluorescent protein from Aequorea victoria (“GFP”) and its variants. These proteins are intrinsically fluorescent: the GFP-like chromophore is entirely encoded by its amino acid sequence and can fluoresce without requirement for cofactor or substrate.

[0278] Structurally, the GFP-like chromophore comprises an 11-stranded β-barrel (β-can) with a central α-helix, the central α-helix having a conjugated π-resonance system that includes two aromatic ring systems and the bridge between them. The π-resonance system is created by autocatalytic cyclization among amino acids; cyclization proceeds through an imidazolinone intermediate, with subsequent dehydrogenation by molecular oxygen at the Cα-Cβ bond of a participating tyrosine.

[0279] The GFP-like chromophore can be selected from GFP-like chromophores found in naturally occurring proteins, such as A. victoria GFP (GenBank accession number AAA27721), Renilla reniformis GFP, FP583 (GenBank accession no. AF168419) (DsRed), FP593 (AF272711), FP483 (AF168420), FP484 (AF168424), FP595 (AF246709), FP486 (AF168421), FP538 (AF168423), and FP506 (AF168422), and need include only so much of the native protein as is needed to retain the chromophore's intrinsic fluorescence. Methods for determining the minimal domain required for fluorescence are known in the art. Li et al., “Deletions of the Aequorea victoria Green Fluorescent Protein Define the Minimal Domain Required for Fluorescence,” J. Biol. Chem. 272:28545-28549 (1997).

[0280] Alternatively, the GFP-like chromophore can be selected from GFP-like chromophores modified from those found in nature. Typically, such modifications are made to improve recombinant production in heterologous expression systems (with or without change in protein sequence), to alter the excitation and/or emission spectra of the native protein, to facilitate purification, to facilitate or as a consequence of cloning, or are a fortuitous consequence of research investigation.

[0281] The methods for engineering such modified GFP-like chromophores and testing them for fluorescence activity, both alone and as part of protein fusions, are well-known in the art. Early results of these efforts are reviewed in Heim et al., Curr. Biol. 6:178-182 (1996), incorporated herein by reference in its entirety; a more recent review, with tabulation of useful mutations, is found in Palm et al., “Spectral Variants of Green Fluorescent Protein,” in Green Fluorescent Proteins, Conn (ed.), Methods Enzymol. vol. 302, pp. 378-394 (1999), incorporated herein by reference in its entirety. A variety of such modified chromophores are now commercially available and can readily be used in the fusion proteins of the present invention.

[0282] For example, EGFP (“enhanced GFP”), Cormack et al., Gene 173:33-38 (1996); U.S. Pat. Nos. 6,090,919 and 5,804,387, is a red-shifted, human codon-optimized variant of GFP that has been engineered for brighter fluorescence, higher expression in mammalian cells, and for an excitation spectrum optimized for use in flow cytometers. EGFP can usefully contribute a GFP-like chromophore to the fusion proteins of the present invention. A variety of EGFP vectors, both plasmid and viral, are available commercially (Clontech Labs, Palo Alto, Calif., USA), including vectors for bacterial expression, vectors for N-terminal protein fusion expression, vectors for expression of C-terminal protein fusions, and for bicistronic expression.

[0283] Toward the other end of the emission spectrum, EBFP (“enhanced blue fluorescent protein”) and BFP2 contain four amino acid substitutions that shift the emission from green to blue, enhance the brightness of fluorescence and improve solubility of the protein, Heim et al., Curr. Biol. 6:178-182 (1996); Cormack et al., Gene 173:33-38 (1996). EBFP is optimized for expression in mammalian cells whereas BFP2, which retains the original jellyfish codons, can be expressed in bacteria; as is further discussed below, the host cell of production does not affect the utility of the resulting fusion protein. The GFP-like chromophores from EBFP and BFP2 can usefully be included in the fusion proteins of the present invention, and vectors containing these blue-shifted variants are available from Clontech Labs (Palo Alto, Calif., USA).

[0284] Analogously, EYFP (“enhanced yellow fluorescent protein”), also available from Clontech Labs, contains four amino acid substitutions, different from EBFP, Ormö et al., Science 273:1392-1395 (1996), that shift the emission from green to yellowish-green. Citrine, an improved yellow fluorescent protein mutant, is described in Heikal et al., Proc. Natl. Acad. Sci. USA 97:11996-12001 (2000). ECFP (“enhanced cyan fluorescent protein”) (Clontech Labs, Palo Alto, Calif., USA) contains six amino acid substitutions, one of which shifts the emission spectrum from green to cyan. Heim et al., Curr. Biol. 6:178-182 (1996); Miyawaki et al., Nature 388:882-887 (1997). The GFP-like chromophore of each of these GFP variants can usefully be included in the fusion proteins of the present invention.

[0285] The GFP-like chromophore can also be drawn from other modified GFPs, including those described in U.S. Pat. Nos. 6,124,128; 6,096,865; 6,090,919; 6,066,476; 6,054,321; 6,027,881; 5,968,750; 5,874,304; 5,804,387; 5,777,079; 5,741,668; and 5,625,048, the disclosures of which are incorporated herein by reference in their entireties. See also Conn (ed.), Green Fluorescent Protein, Methods in Enzymol. Vol. 302, pp 378-394 (1999), incorporated herein by reference in its entirety. A variety of such modified chromophores are now commercially available and can readily be used in the fusion proteins of the present invention.

[0286] Fusions to the IgG Fc region increase serum half life of protein pharmaceutical products through interaction with the FcRn receptor (also denominated the FcRp receptor and the Brambell receptor, FcRb), further described in international patent application nos. WO 97/43316, WO 97/34631, WO 96/32478, WO 96/18412.

[0287] For long-term, high-yield recombinant production of the proteins, protein fusions, and protein fragments of the present invention, stable expression is particularly useful.

[0288] Stable expression is readily achieved by integration into the host cell genome of vectors having selectable markers, followed by selection for integrants.

[0289] For example, the pUB6/V5-His A, B, and C vectors (Invitrogen, Carlsbad, Calif., USA) are designed for high-level stable expression of heterologous proteins in a wide range of mammalian tissue types and cell lines. pUB6/V5-His uses the promoter/enhancer sequence from the human ubiquitin C gene to drive expression of recombinant proteins: expression levels in 293, CHO, and NIH3T3 cells are comparable to levels from the CMV and human EF-1a promoters. The bsd gene permits rapid selection of stably transfected mammalian cells with the potent antibiotic blasticidin.

[0290] Replication incompetent retroviral vectors, typically derived from Moloney murine leukemia virus, prove particularly useful for creating stable transfectants having integrated provirus. The highly efficient transduction machinery of retroviruses, coupled with the availability of a variety of packaging cell lines—such as RetroPack™ PT 67, EcoPack2™-293, AmphoPack-293, GP2-293 cell lines (all available from Clontech Laboratories, Palo Alto, Calif., USA)—allow a wide host range to be infected with high efficiency; varying the multiplicity of infection readily adjusts the copy number of the integrated provirus. Retroviral vectors are available with a variety of selectable markers, such as resistance to neomycin, hygromycin, and puromycin, permitting ready selection of stable integrants.

[0291] The present invention further includes host cells comprising the vectors of the present invention, either present episomally within the cell or integrated, in whole or in part, into the host cell chromosome.

[0292] Among other considerations, some of which are described above, a host cell strain may be chosen for its ability to process the expressed protein in the desired fashion. Such post-translational modifications of the polypeptide include, but are not limited to, acetylation, carboxylation, glycosylation, phosphorylation, lipidation, and acylation, and it is an aspect of the present invention to provide HTPL proteins with such post-translational modifications.

[0293] As noted earlier, host cells can be prokaryotic or eukaryotic. Representative examples of appropriate host cells include, but are not limited to, bacterial cells, such as E. coli, Caulobacter crescentus, Streptomyces species, and Salmonella typhimurium; yeast cells, such as Saccharomyces cerevisiae, Schizosaccharomyces pombe, Pichia pastoris, Pichia methanolica; insect cell lines, such as those from Spodoptera frugiperda—e.g., Sf9 and Sf21 cell lines, and expresSF™ cells (Protein Sciences Corp., Meriden, Conn., USA)—Drosophila S2 cells, and Trichoplusia ni High Five® Cells (Invitrogen, Carlsbad, Calif., USA); and mammalian cells. Typical mammalian cells include COS1 and COS7 cells, chinese hamster ovary (CHO) cells, NIH 3T3 cells, 293 cells, HEPG2 cells, HeLa cells, L cells, murine ES cell lines (e.g., from strains 129/SV, C57/BL6, DBA-1, 129/SVJ), K562, Jurkat cells, and BW5147. Other mammalian cell lines are well known and readily available from the American Type Culture Collection (ATCC) (Manassas, Va., USA) and the National Institute of General medical Sciences (NIGMS) Human Genetic Cell Repository at the Coriell Cell Repositories (Camden, N.J., USA).

[0294] Methods for introducing the vectors and nucleic acids of the present invention into the host cells are well known in the art; the choice of technique will depend primarily upon the specific vector to be introduced and the host cell chosen.

[0295] For example, phage lambda vectors will typically be packaged using a packaging extract (e.g., Gigapack® packaging extract, Stratagene, La Jolla, Calif., USA), and the packaged virus used to infect E. coli. Plasmid vectors will typically be introduced into chemically competent or electrocompetent bacterial cells.

[0296] E. coli cells can be rendered chemically competent by treatment, e.g., with CaCl₂, or a solution of Mg²⁺, Mn²⁺, Ca²⁺, Rb⁺ or K⁺, dimethyl sulfoxide, dithiothreitol, and hexamine cobalt (III), Hanahan, J. Mol. Biol. 166(4):557-80 (1983), and vectors introduced by heat shock. A wide variety of chemically competent strains are also available commercially (e.g., Epicurian Coli® XL10-Gold® Ultracompetent-Cells (Stratagene, La Jolla, Calif., USA); DH5α competent cells (Clontech Laboratories, Palo Alto, Calif., USA); TOP10 Chemically Competent E. coli Kit (Invitrogen, Carlsbad, Calif., USA)).

[0297] Bacterial cells can be rendered electrocompetent—that is, competent to take up exogenous DNA by electroporation—by various pre-pulse treatments; vectors are introduced by electroporation followed by subsequent outgrowth in selected media. An extensive series of protocols is provided online in Electroprotocols (BioRad, Richmond, Calif., USA) (http://www.bio-rad.com/LifeScience/pdf/New_Gene_Pulser.pdf).

[0298] Vectors can be introduced into yeast cells by spheroplasting, treatment with lithium salts, electroporation, or protoplast fusion.

[0299] Spheroplasts are prepared by the action of hydrolytic enzymes—a snail-gut extract, usually denoted Glusulase, or Zymolyase, an enzyme from Arthrobacter luteus—to remove portions of the cell wall in the presence of osmotic stabilizers, typically 1 M sorbitol. DNA is added to the spheroplasts, and the mixture is co-precipitated with a solution of polyethylene glycol (PEG) and Ca²⁺. Subsequently, the cells are resuspended in a solution of sorbitol, mixed with molten agar and then layered on the surface of a selective plate containing sorbitol. For lithium-mediated transformation, yeast cells are treated with lithium acetate, which apparently permeabilizes the cell wall, DNA is added and the cells are co-precipitated with PEG. The cells are exposed to a brief heat shock, washed free of PEG and lithium acetate, and subsequently spread on plates containing ordinary selective medium. Increased frequencies of transformation are obtained by using specially-prepared single-stranded carrier DNA and certain organic solvents. Schiestl et al., Curr. Genet. 16(5-6): 339-46 (1989). For electroporation, freshly-grown yeast cultures are typically washed, suspended in an osmotic protectant, such as sorbitol, mixed with DNA, and the cell suspension pulsed in an electroporation device. Subsequently, the cells are spread on the surface of plates containing selective media. Becker et al., Methods Enzymol. 194:182-7 (1991). The efficiency of transformation by electroporation can be increased over 100-fold by using PEG, single-stranded carrier DNA and cells that are in late log-phase of growth. Larger constructs, such as YACs, can be introduced by protoplast fusion.

[0300] Mammalian and insect cells can be directly infected by packaged viral vectors, or transfected by chemical or electrical means.

[0301] For chemical transfection, DNA can be coprecipitated with CaPO₄ or introduced using liposomal and nonliposomal lipid-based agents. Commercial kits are available for CaPO₄ transfection (CalPhos™ Mammalian Transfection Kit, Clontech Laboratories, Palo Alto, Calif., USA), and lipid-mediated transfection can be practiced using commercial reagents, such as LIPOFECTAMINE™ 2000, LIPOFECTAMINE™ Reagent, CELLFECTIN® Reagent, and LIPOFECTIN® Reagent (Invitrogen, Carlsbad, Calif., USA), DOTAP Liposomal Transfection Reagent, FuGENE 6, X-tremeGENE Q2, DOSPER, (Roche Molecular Biochemicals, Indianapolis, Ind. USA), Effectene™, PolyFect®, Superfect® (Qiagen, Inc., Valencia, Calif., USA). Protocols for electroporating mammalian cells can be found online in Electroprotocols (Bio-Rad, Richmond, Calif., USA) (http://www.bio-rad.com/LifeScience/pdf/New_Gene_Pulser.pdf). See also, Norton et al. (eds.), Gene Transfer Methods: Introducing DNA into Living Cells and Organisms, BioTechniques Books, Eaton Publishing Co. (2000) (ISBN 1-881299-34-1), incorporated herein by reference in its entirety.

[0302] Other transfection techniques include transfection by particle embardment. See, e.g., Cheng et al., Proc. Natl. Acad. Sci. USA 90(10):4455-9 (1993); Yang et al., Proc. Natl. Acad. Sci. USA 87(24):9568-72 (1990).

[0303] Proteins

[0304] In another aspect, the present invention provides HTPL proteins, various fragments thereof suitable for use as antigens (e.g., for epitope mapping) and for use as immunogens (e.g., for raising antibodies or as vaccines), fusions of HTPL polypeptides and fragments to heterologous polypeptides, and conjugates of the proteins, fragments, and fusions of the present invention to other moieties (e.g., to carrier proteins, to fluorophores).

[0305] FIG. 3 and FIG. 4 presents the predicted amino acid sequences encoded by the HTPL cDNA clones. The amino acid sequence is further presented, respectively, in SEQ ID NO: 3 (full length amino acid coding sequence of human HTPL-L), and 6 (full length amino acid coding sequence of human HTPL-S).

[0306] Unless otherwise indicated, amino acid sequences of the proteins of the present invention were determined as a predicted translation from a nucleic acid sequence. Accordingly, any amino acid sequence presented herein may contain errors due to errors in the nucleic acid sequence, as described in detail above. Furthermore, single nucleotide polymorphisms (SNPs) occur frequently in eukaryotic genomes—more than 1.4 million SNPs have already identified in the human genome, International Human Genome Sequencing Consortium, Nature 409:860-921 (2001)- and the sequence determined from one individual of a species may differ from other allelic forms present within the population. Small deletions and insertions can often be found that does not alter the function of the protein.

[0307] Accordingly, it is an aspect of the present invention to provide proteins not only identical in sequence to those described with particularity herein, but also to provide isolated proteins at least about 65% identical in sequence to those described with particularity herein, typically at least about 70%, 75%, 80%, 85%, or 90% identical in sequence to those described with particularity herein, usefully at least about 91%, 92%, 93%, 94%, or 95% identical in sequence to those described with particularity herein, usefully at least about 96%, 97%, 98%, or 99% identical in sequence to those described with particularity herein, and, most conservatively, at least about 99.5%, 99.6%, 99.7%, 99.8% and 99.9% identical in sequence to those described with particularity herein. These sequence variants can be naturally occurring or can result from human intervention by way of random or directed mutagenesis.

[0308] For purposes herein, percent identity of two amino acid sequences is determined using the procedure of Tatiana et al., “Blast 2 sequences—a new tool for comparing protein and nucleotide sequences”, FEMS Microbiol Lett. 174:247-250 (1999), which procedure is effectuated by the computer program BLAST 2 SEQUENCES, available online at http://www.ncbi.nlm.nih.gov/blast/bl2seq/bl2.html, To assess percent identity of amino acid sequences, the BLASTP module of BLAST 2 SEQUENCES is used with default values of (i) BLOSUM62 matrix, Henikoff et al., Proc. Natl. Acad. Sci USA 89(22):10915-9 (1992); (ii) open gap 11 and extension gap 1 penalties; and (iii) gap x_dropoff 50 expect 10 word size 3 filter, and both sequences are entered in their entireties.

[0309] As is well known, amino acid substitutions occur frequently among natural allelic variants, with conservative substitutions often occasioning only de minimis change in protein function.

[0310] Accordingly, it is an aspect of the present invention to provide proteins not only identical in sequence to those described with particularity herein, but also to provide isolated proteins having the sequence of HTPL proteins, or portions thereof, with conservative amino acid substitutions. It is a further aspect to provide isolated proteins having the sequence of HTPL proteins, and portions thereof, with moderately conservative amino acid substitutions. These conservatively-substituted and moderately conservatively-substituted variants can be naturally occurring or can result from human intervention.

[0311] Although there are a variety of metrics for calling conservative amino acid substitutions, based primarily on either observed changes among evolutionarily related proteins or on predicted chemical similarity, for purposes herein a conservative replacement is any change having a positive value in the PAM250 log-likelihood matrix reproduced herein below (see Gonnet et al., Science 256(5062):1443-5 (1992)):

$$\begin{matrix} & A & R & N & D & C & Q & E & G & H & I & L & K & M & F & P & S & T & W & Y & V \\ A & 2 & - 1 & 0 & 0 & 0 & 0 & 0 & 0 & - 1 & - 1 & - 1 & 0 & - 1 & - 2 & 0 & 1 & 1 & - 4 & - 2 & 0 \\ R & - 1 & 5 & 0 & 0 & - 2 & 2 & 0 & - 1 & 1 & - 2 & - 2 & 3 & - 2 & - 3 & - 1 & 0 & 0 & - 2 & - 2 & - 2 \\ N & 0 & 0 & 4 & 2 & - 2 & 1 & 1 & 0 & 1 & - 3 & - 3 & 1 & - 2 & - 3 & - 1 & 1 & 0 & - 4 & - 1 & - 2 \\ D & 0 & 0 & 2 & 5 & - 3 & 1 & 3 & 0 & 0 & - 4 & - 4 & 0 & - 3 & - 4 & - 1 & 0 & 0 & - 5 & - 3 & - 3 \\ C & 0 & - 2 & - 2 & - 3 & 12 & - 2 & - 3 & - 2 & - 1 & - 1 & - 2 & - 3 & - 1 & - 1 & - 3 & 0 & 0 & - 1 & 0 & 0 \\ Q & 0 & 2 & 1 & 1 & - 2 & 3 & 2 & - 1 & 1 & - 2 & - 2 & 2 & - 1 & - 3 & 0 & 0 & 0 & - 3 & - 2 & - 2 \\ E & 0 & 0 & 1 & 3 & - 3 & 2 & 4 & - 1 & 0 & - 3 & - 3 & 1 & - 2 & - 4 & 0 & 0 & 0 & - 4 & - 3 & - 2 \\ G & 0 & - 1 & 0 & 0 & - 2 & - 1 & - 1 & 7 & - 1 & - 4 & - 4 & - 1 & - 4 & - 5 & - 2 & 0 & - 1 & - 4 & - 4 & - 3 \\ H & - 1 & 1 & 1 & 0 & - 1 & 1 & 0 & - 1 & 6 & - 2 & - 2 & 1 & - 1 & 0 & - 1 & 0 & 0 & - 1 & 2 & - 2 \\ I & - 1 & - 2 & - 3 & - 4 & - 1 & - 2 & - 3 & - 4 & - 2 & 4 & 3 & - 2 & 2 & 1 & - 3 & - 2 & - 1 & - 2 & - 1 & 3 \\ L & - 1 & - 2 & - 3 & - 4 & - 2 & - 2 & - 3 & - 4 & - 2 & 3 & 4 & - 2 & 3 & 2 & - 2 & - 2 & - 1 & - 1 & 0 & 2 \\ K & 0 & 3 & 1 & 0 & - 3 & 2 & 1 & - 1 & 1 & - 2 & - 2 & 3 & - 1 & - 3 & - 1 & 0 & 0 & - 4 & - 2 & - 2 \\ M & - 1 & - 2 & - 2 & - 3 & - 1 & - 1 & - 2 & - 4 & - 1 & 2 & 3 & - 1 & 4 & 2 & - 2 & - 1 & - 1 & - 1 & 0 & 2 \\ F & - 2 & - 3 & - 3 & - 4 & - 1 & - 3 & - 4 & - 5 & 0 & 1 & 2 & - 3 & 2 & 7 & - 4 & - 3 & - 2 & 4 & 5 & 0 \\ P & 0 & - 1 & - 1 & - 1 & - 3 & 0 & 0 & - 2 & - 1 & - 3 & - 2 & - 1 & - 2 & - 4 & 8 & 0 & 0 & - 5 & - 3 & - 2 \\ S & 1 & 0 & 1 & 0 & 0 & 0 & 0 & 0 & 0 & - 2 & - 2 & 0 & - 1 & - 3 & 0 & 2 & 2 & - 3 & - 2 & - 1 \\ T & 1 & 0 & 0 & 0 & 0 & 0 & 0 & - 1 & 0 & - 1 & - 1 & 0 & - 1 & - 2 & 0 & 2 & 2 & - 4 & - 2 & 0 \\ W & - 4 & - 2 & - 4 & - 5 & - 1 & - 3 & - 4 & - 4 & - 1 & - 2 & - 1 & - 4 & - 1 & 4 & - 5 & - 3 & - 4 & 14 & 4 & - 3 \\ Y & - 2 & - 2 & - 1 & - 3 & 0 & - 2 & - 3 & - 4 & 2 & - 1 & 0 & - 2 & 0 & 5 & - 3 & - 2 & - 2 & 4 & 8 & - 1 \\ V & 0 & - 2 & - 2 & - 3 & 0 & - 2 & - 2 & - 3 & - 2 & 3 & 2 & - 2 & 2 & 0 & - 2 & - 1 & 0 & - 3 & - 1 & 3\end{matrix}$$

For purposes herein, a “moderately conservative” replacement is any change having a nonnegative value in the PAM250 log-likelihood matrix reproduced herein above.

[0312] As is also well known in the art, relatedness of proteins can also be characterized using a functional test, the ability of the encoding nucleic acids to base-pair to one another at defined hybridization stringencies.

[0313] It is, therefore, another aspect of the invention to provide isolated proteins not only identical in sequence to those described with particularity herein, but also to provide isolated proteins (“hybridization related proteins”) that are encoded by nucleic acids that hybridize under high stringency conditions (as defined herein above) to all or to a portion of various of the isolated nucleic acids of the present invention (“reference nucleic acids”). It is a further aspect of the invention to provide isolated proteins (“hybridization related proteins”) that are encoded by nucleic acids that hybridize under moderate stringency conditions (as defined herein above) to all or to a portion of various of the isolated nucleic acids of the present invention (“reference nucleic acids”).

[0314] The hybridization related proteins can be alternative isoforms, homologues, paralogues, and orthologues of the HTPL protein of the present invention. Particularly useful orthologues are those from other primate species, such as chimpanzee, rhesus macaque monkey, baboon, orangutan, and gorilla, from rodents, such as rats, mice, guinea pigs; from lagomorphs, such as rabbits, and from domestic livestock, such as cow, pig, sheep, horse, and goat.

[0315] Relatedness of proteins can also be characterized using a second functional test, the ability of a first protein competitively to inhibit the binding of a second protein to an antibody.

[0316] It is, therefore, another aspect of the present invention to provide isolated proteins not only identical in sequence to those described with particularity herein, but also to provide isolated proteins (“cross-reactive proteins”) that competitively inhibit the binding of antibodies to all or to a portion of various of the isolated HTPL proteins of the present invention (“reference proteins”). Such competitive inhibition can readily be determined using immunoassays well known in the art.

[0317] Among the proteins of the present invention that differ in amino acid sequence from those described with particularity herein—including those that have deletions and insertions causing up to 10% non-identity, those having conservative or moderately conservative substitutions, hybridization related proteins, and cross-reactive proteins—those that substantially retain one or more HTPL activities are particularly useful. As described above, those activities include regulating male germ cell development and tumor suppression.

[0318] Residues that are tolerant of change while retaining function can be identified by altering the protein at known residues using methods known in the art, such as alanine scanning mutagenesis, Cunningham et al., Science 244(4908):1081-5 (1989); transposon linker scanning mutagenesis, Chen et al., Gene 263(1-2): 39-48 (2001); combinations of homolog- and alanine-scanning mutagenesis, Jin et al., J. Mol. Biol. 226(3):851-65 (1992); combinatorial alanine scanning, Weiss et al., Proc. Natl. Acad. Sci USA 97(16):8950-4 (2000), followed by functional assay. Transposon linker scanning kits are available commercially (New England Biolabs, Beverly, Mass., USA, catalog. no. E7-102S; EZ::TN™ In-Frame Linker Insertion Kit, catalogue no. EZI04KN, Epicentre Technologies Corporation, Madison, Wis., USA).

[0319] As further described below, the isolated proteins of the present invention can readily be used as specific immunogens to raise antibodies that specifically recognize HTPL proteins, their isoforms, homologues, paralogues, and/or orthologues. The antibodies, in turn, can be used, inter alia, specifically to assay for the HTPL proteins of the present invention—e.g. by ELISA for detection of protein fluid samples, such as serum, by immunohistochemistry or laser scanning cytometry, for detection of protein in tissue samples, or by flow cytometry, for detection of intracellular protein in cell suspensions—for specific antibody-mediated isolation and/or purification of HTPL proteins, as for example by immunoprecipitation, and for use as specific agonists or antagonists of HTPL action.

[0320] The isolated proteins of the present invention are also immediately available for use as specific standards in assays used to determine the concentration and/or amount specifically of the HTPL proteins of the present invention. As is well known, ELISA kits for detection and quantitation of protein analytes typically include isolated and purified protein of known concentration for use as a measurement standard (e.g., the human interferon-γ OptEIA kit, catalog no. 555142, Pharmingen, San Diego, Calif., USA includes human recombinant gamma interferon, baculovirus produced).

[0321] The isolated proteins of the present invention are also immediately available for use as specific biomolecule capture probes for surface-enhanced laser desorption ionization (SELDI) detection of protein-protein interactions, WO 98/59362; WO 98/59360; WO 98/59361; and Merchant et al., Electrophoresis 21(6):1164-77 (2000), the disclosures of which are incorporated herein by reference in their entireties. Analogously, the isolated proteins of the present invention are also immediately available for use as specific biomolecule capture probes on BIACORE surface plasmon resonance probes. See Weinberger et al., Pharmacogenomics 1(4):395-416 (2000); Malmqvist, Biochem. Soc. Trans. 27(2):335-40 (1999).

[0322] The isolated proteins of the present invention are also useful as a therapeutic supplement in patients having a specific deficiency in HTPL production.

[0323] In another aspect, the invention also provides fragments of various of the proteins of the present invention. The protein fragments are useful, inter alia, as antigenic and immunogenic fragments of HTPL.

[0324] By “fragments” of a protein is here intended isolated proteins (equally, polypeptides, peptides, oligopeptides), however obtained, that have an amino acid sequence identical to a portion of the reference amino acid sequence, which portion is at least 6 amino acids and less than the entirety of the reference nucleic acid. As so defined, “fragments” need not be obtained by physical fragmentation of the reference protein, although such provenance is not thereby precluded.

[0325] Fragments of at least 6 contiguous amino acids are useful in mapping B cell and T cell epitopes of the reference protein. See, e.g., Geysen et al., “Use of peptide synthesis to probe viral antigens for epitopes to a resolution of a single amino acid,” Proc. Natl. Acad. Sci. USA 81:3998-4002 (1984) and U.S. Pat. Nos. 4,708,871 and 5,595,915, the disclosures of which are incorporated herein by reference in their entireties. Because the fragment need not itself be immunogenic, part of an immunodominant epitope, nor even recognized by native antibody, to be useful in such epitope mapping, all fragments of at least 6 amino acids of the proteins of the present invention have utility in such a study.

[0326] Fragments of at least 8 contiguous amino acids, often at least 15 contiguous amino acids, have utility as immunogens for raising antibodies that recognize the proteins of the present invention. See, e.g., Lerner, “Tapping the immunological repertoire to produce antibodies of predetermined specificity,” Nature 299:592-596 (1982); Shinnick et al., “Synthetic peptide immunogens as vaccines,” Annu. Rev. Microbiol. 37:425-46 (1983); Sutcliffe et al., “Antibodies that react with predetermined sites on proteins,” Science 219:660-6 (1983), the disclosures of which are incorporated herein by reference in their entireties. As further described in the above-cited references, virtually all 8-mers, conjugated to a carrier, such as a protein, prove immunogenic—that is, prove capable of eliciting antibody for the conjugated peptide; accordingly, all fragments of at least 8 amino acids of the proteins of the present invention have utility as immunogens.

[0327] Fragments of at least 8, 9, 10 or 12 contiguous amino acids are also useful as competitive inhibitors of binding of the entire protein, or a portion thereof, to antibodies (as in epitope mapping), and to natural binding partners, such as subunits in a multimeric complex or to receptors or ligands of the subject protein; this competitive inhibition permits identification and separation of molecules that bind specifically to the protein of interest, U.S. Pat. Nos. 5,539,084 and 5,783,674, incorporated herein by reference in their entireties.

[0328] The protein, or protein fragment, of the present invention is thus at least 6 amino acids in length, typically at least 8, 9, 10 or 12 amino acids in length, and often at least 15 amino acids in length. Often, the protein or the present invention, or fragment thereof, is at least 20 amino acids in length, even 25 amino acids, 30 amino acids, 35 amino acids, or 50 amino acids or more in length. Of course, larger fragments having at least 75 amino acids, 100 amino acids, or even 150 amino acids are also useful, and at times preferred.

[0329] The present invention further provides fusions of each of the proteins and protein fragments of the present invention to heterologous polypeptides.

[0330] By fusion is here intended that the protein or protein fragment of the present invention is linearly contiguous to the heterologous polypeptide in a peptide-bonded polymer of amino acids or amino acid analogues; by “heterologous polypeptide” is here intended a polypeptide that does not naturally occur in contiguity with the protein or protein fragment of the present invention. As so defined, the fusion can consist entirely of a plurality of fragments of the HTPL protein in altered arrangement; in such case, any of the HTPL fragments can be considered heterologous to the other HTPL fragments in the fusion protein. More typically, however, the heterologous polypeptide is not drawn from the HTPL protein itself.

[0331] The fusion proteins of the present invention will include at least one fragment of the protein of the present invention, which fragment is at least 6, typically at least 8, often at least 15, and usefully at least 16, 17, 18, 19, or 20 amino acids long. The fragment of the protein of the present to be included in the fusion can usefully be at least 25 amino acids long, at least 50 amino acids long, and can be at least 75, 100, or even 150 amino acids long. Fusions that include the entirety of the proteins of the present invention have particular utility.

[0332] The heterologous polypeptide included within the fusion protein of the present invention is at least 6 amino acids in length, often at least 8 amino acids in length, and usefully at least 15, 20, and 25 amino acids in length. Fusions that include larger polypeptides, such as the IgG Fc region, and even entire proteins (such as GFP chromophore-containing proteins), have particular utility.

[0333] As described above in the description of vectors and expression vectors of the present invention, which discussion is incorporated herein by reference in its entirety, heterologous polypeptides to be included in the fusion proteins of the present invention can usefully include those designed to facilitate purification and/or visualization of recombinantly-expressed proteins. Although purification tags can also be incorporated into fusions that are chemically synthesized, chemical synthesis typically provides sufficient purity that further purification by HPLC suffices; however, visualization tags as above described retain their utility even when the protein is produced by chemical synthesis, and when so included render the fusion proteins of the present invention useful as directly detectable markers of HTPL presence.

[0334] As also discussed above, heterologous polypeptides to be included in the fusion proteins of the present invention can usefully include those that facilitate secretion of recombinantly expressed proteins—into the periplasmic space or extracellular milieu for prokaryotic hosts, into the culture medium for eukaryotic cells—through incorporation of secretion signals and/or leader sequences.

[0335] Other useful protein fusions of the present invention include those that permit use of the protein of the present invention as bait in a yeast two-hybrid system. See Bartel et al. (eds.), The Yeast Two-Hybrid System, Oxford University Press (1997) (ISBN: 0195109384); Zhu et al., Yeast Hybrid Technologies, Eaton Publishing, (2000) (ISBN 1-881299-15-5); Fields et al., Trends Genet. 10(8):286-92 (1994); Mendelsohn et al., Curr. Opin. Biotechnol. 5(5):482-6 (1994); Luban et al., Curr. Opin. Biotechnol. 6(1):59-64 (1995); Allen et al., Trends Biochem. Sci. 20(12):511-6 (1995); Drees, Curr. Opin. Chem. Biol. 3(1):64-70 (1999); Topcu et al., Pharm. Res. 17(9):1049-55 (2000); Fashena et al., Gene 250(1-2): 1-14 (2000), the disclosures of which are incorporated herein by reference in their entireties. Typically, such fusion is to either E. coli LexA or yeast GAL4 DNA binding domains. Related bait plasmids are available that express the bait fused to a nuclear localization signal.

[0336] Other useful protein fusions include those that permit display of the encoded protein on the surface of a phage or cell, fusions to intrinsically fluorescent proteins, such as green fluorescent protein (GFP), and fusions to the IgG Fc region, as described above, which discussion is incorporated here by reference in its entirety.

[0337] The proteins and protein fragments of the present invention can also usefully be fused to protein toxins, such as Pseudomonas exotoxin A, diphtheria toxin, shiga toxin A, anthrax toxin lethal factor, ricin, in order to effect ablation of cells that bind or take up the proteins of the present invention.

[0338] The isolated proteins, protein fragments, and protein fusions of the present invention can be composed of natural amino acids linked by native peptide bonds, or can contain any or all of nonnatural amino acid analogues, normative bonds, and post-synthetic (post translational) modifications, either throughout the length of the protein or localized to one or more portions thereof.

[0339] As is well known in the art, when the isolated protein is used, e.g., for epitope mapping, the range of such nonnatural analogues, normative inter-residue bonds, or post-synthesis modifications will be limited to those that permit binding of the peptide to antibodies. When used as an immunogen for the preparation of antibodies in a non-human host, such as a mouse, the range of such nonnatural analogues, normative inter-residue bonds, or post-synthesis modifications will be limited to those that do not interfere with the immunogenicity of the protein. When the isolated protein is used as a therapeutic agent, such as a vaccine or for replacement therapy, the range of such changes will be limited to those that do not confer toxicity upon the isolated protein.

[0340] Non-natural amino acids can be incorporated during solid phase chemical synthesis or by recombinant techniques, although the former is typically more common.

[0341] Solid phase chemical synthesis of peptides is well established in the art. Procedures are described, inter alia, in Chan et al. (eds.), Fmoc Solid Phase Peptide Synthesis: A Practical Approach (Practical Approach Series), Oxford Univ. Press (March 2000) (ISBN: 0199637245); Jones, Amino Acid and Peptide Synthesis (Oxford Chemistry Primers, No 7), Oxford Univ. Press (August 1992) (ISBN: 0198556683); and Bodanszky, Principles of Peptide Synthesis (Springer Laboratory), Springer Verlag (December 1993) (ISBN: 0387564314), the disclosures of which are incorporated herein by reference in their entireties.

[0342] For example, D-enantiomers of natural amino acids can readily be incorporated during chemical peptide synthesis: peptides assembled from D-amino acids are more resistant to proteolytic attack; incorporation of D-enantiomers can also be used to confer specific three dimensional conformations on the peptide. Other amino acid analogues commonly added during chemical synthesis include ornithine, norleucine, phosphorylated amino acids (typically phosphoserine, phosphothreonine, phosphotyrosine), L-malonyltyrosine, a non-hydrolyzable analog of phosphotyrosine (Kole et al., Biochem. Biophys. Res. Com. 209:817-821 (1995)), and various halogenated phenylalanine derivatives.

[0343] Amino acid analogues having detectable labels are also usefully incorporated during synthesis to provide a labeled polypeptide.

[0344] Biotin, for example (indirectly detectable through interaction with avidin, streptavidin, neutravidin, captavidin, or anti-biotin antibody), can be added using biotinoyl—(9-fluorenylmethoxycarbonyl)-L-lysine (FMOC biocytin) (Molecular Probes, Eugene, Oreg., USA). (Biotin can also be added enzymatically by incorporation into a fusion protein of a E. coli BirA substrate peptide.)

[0345] The FMOC and tBOC derivatives of dabcyl-L-lysine (Molecular Probes, Inc., Eugene, Oreg., USA) can be used to incorporate the dabcyl chromophore at selected sites in the peptide sequence during synthesis. The aminonaphthalene derivative EDANS, the most common fluorophore for pairing with the dabcyl quencher in fluorescence resonance energy transfer (FRET) systems, can be introduced during automated synthesis of peptides by using EDANS—FMOC-L-glutamic acid or the corresponding tBOC derivative (both from Molecular Probes, Inc., Eugene, Oreg., USA). Tetramethylrhodamine fluorophores can be incorporated during automated FMOC synthesis of peptides using (FMOC)—TMR-L-lysine (Molecular Probes, Inc. Eugene, Oreg., USA).

[0346] Other useful amino acid analogues that can be incorporated during chemical synthesis include aspartic acid, glutamic acid, lysine, and tyrosine analogues having allyl side-chain protection (Applied Biosystems, Inc., Foster City, Calif., USA); the allyl side chain permits synthesis of cyclic, branched-chain, sulfonated, glycosylated, and phosphorylated peptides.

[0347] A large number of other FMOC-protected non-natural amino acid analogues capable of incorporation during chemical synthesis are available commercially, including, e.g., Fmoc-2-aminobicyclo[2.2.1]heptane-2-carboxylic acid, Fmoc-3-endo-aminobicyclo[2.2.1]heptane-2-endo-carboxylic acid, Fmoc-3-exo-aminobicyclo[2.2.1]heptane-2-exo-carboxylic acid, Fmoc-3-endo-amino-bicyclo[2.2.1]hept-5-ene-2-endo-carboxylic acid, Fmoc-3-exo-amino-bicyclo[2.2.1]hept-5-ene-2-exo-carboxylic acid, Fmoc-cis-2-amino-1-cyclohexanecarboxylic acid, Fmoc-trans-2-amino-1-cyclohexanecarboxylic acid, Fmoc-1-amino-1-cyclopentanecarboxylic acid, Fmoc-cis-2-amino-1-cyclopentanecarboxylic acid, Fmoc-1-amino-1-cyclopropanecarboxylic acid, Fmoc-D-2-amino-4-(ethylthio)butyric acid, Fmoc-L-2-amino-4-(ethylthio)butyric acid, Fmoc-L-buthionine, Fmoc-S-methyl-L-Cysteine, Fmoc-2-aminobenzoic acid (anthranillic acid), Fmoc-3-aminobenzoic acid, Fmoc-4-aminobenzoic acid, Fmoc-2-aminobenzophenone-2′-carboxylic acid, Fmoc-N-(4-aminobenzoyl)-b-alanine, Fmoc-2-amino-4,5-dimethoxybenzoic acid, Fmoc-4-aminohippuric acid, Fmoc-2-amino-3-hydroxybenzoic acid, Fmoc-2-amino-5-hydroxybenzoic acid, Fmoc-3-amino-4-hydroxybenzoic acid, Fmoc-4-amino-3-hydroxybenzoic acid, Fmoc-4-amino-2-hydroxybenzoic acid, Fmoc-5-amino-2-hydroxybenzoic acid, Fmoc-2-amino-3-methoxybenzoic acid, Fmoc-4-amino-3-methoxybenzoic acid, Fmoc-2-amino-3-methylbenzoic acid, Fmoc-2-amino-5-methylbenzoic acid, Fmoc-2-amino-6-methylbenzoic acid, Fmoc-3-amino-2-methylbenzoic acid, Fmoc-3-amino-4-methylbenzoic acid, Fmoc-4-amino-3-methylbenzoic acid, Fmoc-3-amino-2-naphtoic acid, Fmoc-D,L-3-amino-3-phenylpropionic acid, Fmoc-L-Methyldopa, Fmoc-2-amino-4,6-dimethyl-3-pyridinecarboxylic acid, Fmoc-D,L-?-amino-2-thiophenacetic acid, Fmoc-4-(carboxymethyl)piperazine, Fmoc-4-carboxypiperazine, Fmoc-4-(carboxymethyl)homopiperazine, Fmoc-4-phenyl-4-piperidinecarboxylic acid, Fmoc-L-1,2,3,4-tetrahydronorharman-3-carboxylic acid, Fmoc-L-thiazolidine-4-carboxylic acid, all available from The Peptide Laboratory (Richmond, Calif., USA).

[0348] Non-natural residues can also be added biosynthetically by engineering a suppressor tRNA, typically one that recognizes the UAG stop codon, by chemical aminoacylation with the desired unnatural amino acid and. Conventional site-directed mutagenesis is used to introduce the chosen stop codon UAG at the site of interest in the protein gene. When the acylated suppressor tRNA and the mutant gene are combined in an in vitro transcription/translation system, the unnatural amino acid is incorporated in response to the UAG codon to give a protein containing that amino acid at the specified position. Liu et al., Proc. Natl. Acad. Sci. USA 96(9):4780-5 (1999); Wang et al., Science 292(5516):498-500 (2001).

[0349] The isolated proteins, protein fragments and fusion proteins of the present invention can also include normative inter-residue bonds, including bonds that lead to circular and branched forms.

[0350] The isolated proteins and protein fragments of the present invention can also include post-translational and post-synthetic modifications, either throughout the length of the protein or localized to one or more portions thereof.

[0351] For example, when produced by recombinant expression in eukaryotic cells, the isolated proteins, fragments, and fusion proteins of the present invention will typically include N-linked and/or O-linked glycosylation, the pattern of which will reflect both the availability of glycosylation sites on the protein sequence and the identity of the host cell. Further modification of glycosylation pattern can be performed enzymatically.

[0352] As another example, recombinant polypeptides of the invention may also include an initial modified methionine residue, in some cases resulting from host-mediated processes.

[0353] When the proteins, protein fragments, and protein fusions of the present invention are produced by chemical synthesis, post-synthetic modification can be performed before deprotection and cleavage from the resin or after deprotection and cleavage. Modification before deprotection and cleavage of the synthesized protein often allows greater control, e.g. by allowing targeting of the modifying moiety to the N-terminus of a resin-bound synthetic peptide.

[0354] Useful post-synthetic (and post-translational) modifications include conjugation to detectable labels, such as fluorophores.

[0355] A wide variety of amine-reactive and thiol-reactive fluorophore derivatives have been synthesized that react under nondenaturing conditions with N-terminal amino groups and epsilon amino groups of lysine residues, on the one hand, and with free thiol groups of cysteine residues, on the other.

[0356] Kits are available commercially that permit conjugation of proteins to a variety of amine-reactive or thiol-reactive fluorophores: Molecular Probes, Inc. (Eugene, Oreg., USA), e.g., offers kits for conjugating proteins to Alexa Fluor 350, Alexa Fluor 430, Fluorescein-EX, Alexa Fluor 488, Oregon Green 488, Alexa Fluor 532, Alexa Fluor 546, Alexa Fluor 546, Alexa Fluor 568, Alexa Fluor 594, and Texas Red-X.

[0357] A wide variety of other amine-reactive and thiol-reactive fluorophores are available commercially (Molecular Probes, Inc., Eugene, Oreg., USA), including Alexa Fluor® 350, Alexa Fluor® 488, Alexa Fluor® 532, Alexa Fluor® 546, Alexa Fluor® 568, Alexa Fluor® 594, Alexa Fluor® 647 (monoclonal antibody labeling kits available from Molecular Probes, Inc., Eugene, Oreg., USA), BODIPY dyes, such as BODIPY 493/503, BODIPY FL, BODIPY R6G, BODIPY 530/550, BODIPY TMR, BODIPY 558/568, BODIPY 558/568, BODIPY 564/570, BODIPY 576/589, BODIPY 581/591, BODIPY TR, BODIPY 630/650, BODIPY 650/665, Cascade Blue, Cascade Yellow, Dansyl, lissamine rhodamine B, Marina Blue, Oregon Green 488, Oregon Green 514, Pacific Blue, rhodamine 6G, rhodamine green, rhodamine red, tetramethylrhodamine, Texas Red (available from Molecular Probes, Inc., Eugene, Oreg., USA).

[0358] The polypeptides of the present invention can also be conjugated to fluorophores, other proteins, and other macromolecules, using bifunctional linking reagents.

[0359] Common homobifunctional reagents include, e.g., APG, AEDP, BASED, BMB, BMDB, BMH, BMOE, BM[PEO]3, BM[PEO]4, BS3, BSOCOES, DFDNB, DMA, DMP, DMS, DPDPB, DSG, DSP (Lomant's Reagent), DSS, DST, DTBP, DTME, DTSSP, EGS, HBVS, Sulfo-BSOCOES, Sulfo-DST, Sulfo-EGS (all available from Pierce, Rockford, Ill., USA); common heterobifunctional cross-linkers include ABH, AMAS, ANB-NOS, APDP, ASBA, BMPA, BMPH, BMPS, EDC, EMCA, EMCH, EMCS, KMUA, KMUH, GMBS, LC-SMCC, LC-SPDP, MBS, M2C2H, MPBH, MSA, NHS-ASA, PDPH, PMPI, SADP, SAED, SAND, SANPAH, SASD, SATP, SBAP, SFAD, SIA, SIAB, SMCC, SMPB, SMPH, SMPT, SPDP, Sulfo-EMCS, Sulfo-GMBS, Sulfo-HSAB, Sulfo-KMUS, Sulfo-LC-SPDP, Sulfo-MBS, Sulfo-NHS-LC-ASA, Sulfo-SADP, Sulfo-SANPAH, Sulfo-SIAB, Sulfo-SMCC, Sulfo-SMPB, Sulfo-LC-SMPT, SVSB, TFCS (all available Pierce, Rockford, Ill., USA).

[0360] The proteins, protein fragments, and protein fusions of the present invention can be conjugated, using such cross-linking reagents, to fluorophores that are not amine- or thiol-reactive.

[0361] Other labels that usefully can be conjugated to the proteins, protein fragments, and fusion proteins of the present invention include radioactive labels, echosonographic contrast reagents, and MRI contrast agents.

[0362] The proteins, protein fragments, and protein fusions of the present invention can also usefully be conjugated using cross-linking agents to carrier proteins, such as KLH, bovine thyroglobulin, and even bovine serum albumin (BSA), to increase immunogenicity for raising anti-HTPL antibodies.

[0363] The proteins, protein fragments, and protein fusions of the present invention can also usefully be conjugated to polyethylene glycol (PEG); PEGylation increases the serum half life of proteins administered intravenously for replacement therapy. Delgado et al., Crit. Rev. Ther. Drug Carrier Syst. 9(3-4): 249-304 (1992); Scott et al., Curr. Pharm. Des. 4(6):423-38 (1998); DeSantis et al., Curr. Opin. Biotechnol. 10(4):324-30 (1999), incorporated herein by reference in their entireties. PEG monomers can be attached to the protein directly or through a linker, with PEGylation using PEG monomers activated with tresyl chloride (2,2,2-trifluoroethanesulphonyl chloride) permitting direct attachment under mild conditions.

[0364] The isolated proteins of the present invention, including fusions thereof, can be produced by recombinant expression, typically using the expression vectors of the present invention as above-described or, if fewer than about 100 amino acids, by chemical synthesis (typically, solid phase synthesis), and, on occasion, by in vitro translation.

[0365] Production of the isolated proteins of the present invention can optionally be followed by purification. Purification of recombinantly expressed proteins is now well within the skill in the art. See, e.g., Thorner et al. (eds.), Applications of Chimeric Genes and Hybrid Proteins, Part A: Gene Expression and Protein Purification (Methods in Enzymology, Volume 326), Academic Press (2000), (ISBN: 0121822273); Harbin (ed.), Cloning, Gene Expression and Protein Purification: Experimental Procedures and Process Rationale, Oxford Univ. Press (2001) (ISBN: 0195132947); Marshak et al., Strategies for Protein Purification and Characterization: A Laboratory Course Manual, Cold Spring Harbor Laboratory Press (1996) (ISBN: 0-87969-385-1); and Roe (ed.), Protein Purification Applications, Oxford University Press (2001), the disclosures of which are incorporated herein by reference in their entireties, and thus need not be detailed here.

[0366] Briefly, however, if purification tags have been fused through use of an expression vector that appends such tag, purification can be effected, at least in part, by means appropriate to the tag, such as use of immobilized metal affinity chromatography for polyhistidine tags. Other techniques common in the art include ammonium sulfate fractionation, immunoprecipitation, fast protein liquid chromatography (FPLC), high performance liquid chromatography (HPLC), and preparative gel electrophoresis.

[0367] Purification of chemically-synthesized peptides can readily be effected, e.g., by HPLC.

[0368] Accordingly, it is an aspect of the present invention to provide the isolated proteins of the present invention in pure or substantially pure form.

[0369] A purified protein of the present invention is an isolated protein, as above described, that is present at a concentration of at least 95%, as measured on a weight basis (w/w) with respect to total protein in a composition. Such purities can often be obtained during chemical synthesis without further purification, as, e.g., by HPLC. Purified proteins of the present invention can be present at a concentration (measured on a weight basis with respect to total protein in a composition) of 96%, 97%, 98%, and even 99%. The proteins of the present invention can even be present at levels of 99.5%, 99.6%, and even 99.7%, 99.8%, or even 99.9% following purification, as by HPLC.

[0370] Although high levels of purity are particularly useful when the isolated proteins of the present invention are used as therapeutic agents—such as vaccines, or for replacement therapy—the isolated proteins of the present invention are also useful at lower purity. For example, partially purified proteins of the present invention can be used as immunogens to raise antibodies in laboratory animals.

[0371] Thus, in another aspect, the present invention provides the isolated proteins of the present invention in substantially purified form. A “substantially purified protein” of the present invention is an isolated protein, as above described, present at a concentration of at least 70%, measured on a weight basis with respect to total protein in a composition. Usefully, the substantially purified protein is present at a concentration, measured on a weight basis with respect to total protein in a composition, of at least 75%, 80%, or even at least 85%, 90%, 91%, 92%, 93%, 94%, 94.5% or even at least 94.9%.

[0372] In preferred embodiments, the purified and substantially purified proteins of the present invention are in compositions that lack detectable ampholytes, acrylamide monomers, bis-acrylamide monomers, and polyacrylamide.

[0373] The proteins, fragments, and fusions of the present invention can usefully be attached to a substrate. The substrate can porous or solid, planar or non-planar; the bond can be covalent or noncovalent.

[0374] For example, the proteins, fragments, and fusions of the present invention can usefully be bound to a porous substrate, commonly a membrane, typically comprising nitrocellulose, polyvinylidene fluoride (PVDF), or cationically derivatized, hydrophilic PVDF; so bound, the proteins, fragments, and fusions of the present invention can be used to detect and quantify antibodies, e.g. in serum, that bind specifically to the immobilized protein of the present invention.

[0375] As another example, the proteins, fragments, and fusions of the present invention can usefully be bound to a substantially nonporous substrate, such as plastic, to detect and quantify antibodies, e.g. in serum, that bind specifically to the immobilized protein of the present invention. Such plastics include polymethylacrylic, polyethylene, polypropylene, polyacrylate, polymethylmethacrylate, polyvinylchloride, polytetrafluoroethylene, polystyrene, polycarbonate, polyacetal, polysulfone, celluloseacetate, cellulosenitrate, nitrocellulose, or mixtures thereof; when the assay is performed in standard microtiter dish, the plastic is typically polystyrene.

[0376] The proteins, fragments, and fusions of the present invention can also be attached to a substrate suitable for use as a surface enhanced laser desorption ionization source; so attached, the protein, fragment, or fusion of the present invention is useful for binding and then detecting secondary proteins that bind with sufficient affinity or avidity to the surface-bound protein to indicate biologic interaction therebetween. The proteins, fragments, and fusions of the present invention can also be attached to a substrate suitable for use in surface plasmon resonance detection; so attached, the protein, fragment, or fusion of the present invention is useful for binding and then detecting secondary proteins that bind with sufficient affinity or avidity to the surface-bound protein to indicate biological interaction therebetween.

[0377] HTPL Proteins

[0378] In a first series of protein embodiments, the invention provides an isolated HTPL-L polypeptide having the amino acid sequence in SEQ ID NO: 3, which are full length HTPL-L proteins. When used as immunogens, the full length proteins of the present invention can be used, inter alia, to elicit antibodies that bind to a variety of epitopes of the HTPL-L protein.

[0379] The invention further provides fragments of the above-described polypeptides, particularly fragments having at least 6 amino acids, typically at least 8 amino acids, often at least 15 amino acids, and even the entirety of the sequence given in SEQ ID NO: 3.

[0380] In another series of protein embodiments, the invention provides an isolated HTPL-S polypeptide having the amino acid sequence in SEQ ID NO: 6, which are full length HTPL-S proteins. When used as immunogens, the full length proteins of the present invention can be used, inter alia, to elicit antibodies that bind to a variety of epitopes of the HTPL-S protein.

[0381] The invention further provides fragments of the above-described polypeptides, particularly fragments having at least 6 amino acids, typically at least 8 amino acids, often at least 15 amino acids, and even the entirety of the sequence given in SEQ ID NO: 6.

[0382] The invention further provides fragments of at least 6 amino acids, typically at least 8 amino acids, often at least 15 amino acids, and even the entirety of the sequence given in SEQ ID NO: 10, SEQ ID NO: 14, SEQ ID NO: 4799.

[0383] As described above, the invention further provides proteins that differ in sequence from those described with particularity in the above-referenced SEQ ID NOs., whether by way of insertion or deletion, by way of conservative or moderately conservative substitutions, as hybridization related proteins, or as cross-hybridizing proteins, with those that substantially retain a HTPL activity particularly useful.

[0384] The invention further provides fusions of the proteins and protein fragments herein described to heterologous polypeptides.

[0385] Antibodies and Antibody-Producing Cells

[0386] In another aspect, the invention provides antibodies, including fragments and derivatives thereof, that bind specifically to HTPL proteins and protein fragments of the present invention or to one or more of the proteins and protein fragments encoded by the isolated HTPL nucleic acids of the present invention. The antibodies of the present invention can be specific for all of linear epitopes, discontinuous epitopes, or conformational epitopes of such proteins or protein fragments, either as present on the protein in its native conformation or, in some cases, as present on the proteins as denatured, as, e.g., by solubilization in SDS.

[0387] In other embodiments, the invention provides antibodies, including fragments and derivatives thereof, the binding of which can be competitively inhibited by one or more of the HTPL proteins and protein fragments of the present invention, or by one or more of the proteins and protein fragments encoded by the isolated HTPL nucleic acids of the present invention.

[0388] As used herein, the term “antibody” refers to a polypeptide, at least a portion of which is encoded by at least one immunoglobulin gene, which can bind specifically to a first molecular species, and to fragments or derivatives thereof that remain capable of such specific binding.

[0389] By “bind specifically” and “specific binding” is here intended the ability of the antibody to bind to a first molecular species in preference to binding to other molecular species with which the antibody and first molecular species are admixed. An antibody is said specifically to “recognize” a first molecular species when it can bind specifically to that first molecular species.

[0390] As is well known in the art, the degree to which an antibody can discriminate as among molecular species in a mixture will depend, in part, upon the conformational relatedness of the species in the mixture; typically, the antibodies of the present invention will discriminate over adventitious binding to non-HTPL proteins by at least two-fold, more typically by at least 5-fold, typically by more than 10-fold, 25-fold, 50-fold, 75-fold, and often by more than 100-fold, and on occasion by more than 500-fold or 1000-fold. When used to detect the proteins or protein fragments of the present invention, the antibody of the present invention is sufficiently specific when it can be used to determine the presence of the protein of the present invention in samples derived from human testis, as well as adrenal, adult and fetal liver, bone marrow, brain, kidney, lung, placenta, prostate, skeletal muscle and colon.

[0391] Typically, the affinity or avidity of an antibody (or antibody multimer, as in the case of an IgM pentamer) of the present invention for a protein or protein fragment of the present invention will be at least about 1×10⁻⁶ molar (M), typically at least about 5×10⁻⁷ M, usefully at least about 1×10⁻⁷ M, with affinities and avidities of at least 1×10⁻⁸ M, 5×10⁻⁹ M, and 1×10⁻¹⁰ M proving especially useful.

[0392] The antibodies of the present invention can be naturally-occurring forms, such as IgG, IgM, IgD, IgE, and IgA, from any mammalian species.

[0393] Human antibodies can, but will infrequently, be drawn directly from human donors or human cells. In such case, antibodies to the proteins of the present invention will typically have resulted from fortuitous immunization, such as autoimmune immunization, with the protein or protein fragments of the present invention. Such antibodies will typically, but will not invariably, be polyclonal.

[0394] Human antibodies are more frequently obtained using transgenic animals that express human immunoglobulin genes, which transgenic animals can be affirmatively immunized with the protein immunogen of the present invention. Human Ig-transgenic mice capable of producing human antibodies and methods of producing human antibodies therefrom upon specific immunization are described, inter alia, in U.S. Pat. Nos. 6,162,963; 6,150,584; 6,114,598; 6,075,181; 5,939,598; 5,877,397; 5,874,299; 5,814,318; 5,789,650; 5,770,429; 5,661,016; 5,633,425; 5,625,126; 5,569,825; 5,545,807; 5,545,806, and 5,591,669, the disclosures of which are incorporated herein by reference in their entireties. Such antibodies are typically monoclonal, and are typically produced using techniques developed for production of murine antibodies.

[0395] Human antibodies are particularly useful, and often preferred, when the antibodies of the present invention are to be administered to human beings as in vivo diagnostic or therapeutic agents, since recipient immune response to the administered antibody will often be substantially less than that occasioned by administration of an antibody derived from another species, such as mouse.

[0396] IgG, IgM, IgD, IgE and IgA antibodies of the present invention are also usefully obtained from other mammalian species, including rodents—typically mouse, but also rat, guinea pig, and hamster—lagomorphs, typically rabbits, and also larger mammals, such as sheep, goats, cows, and horses. In such cases, as with the transgenic human-antibody-producing non-human mammals, fortuitous immunization is not required, and the non-human mammal is typically affirmatively immunized, according to standard immunization protocols, with the protein or protein fragment of the present invention.

[0397] As discussed above, virtually all fragments of 8 or more contiguous amino acids of the proteins of the present invention can be used effectively as immunogens when conjugated to a carrier, typically a protein such as bovine thyroglobulin, keyhole limpet hemocyanin, or bovine serum albumin, conveniently using a bifunctional linker such as those described elsewhere above, which discussion is incorporated by reference here.

[0398] Immunogenicity can also be conferred by fusion of the proteins and protein fragments of the present invention to other moieties.

[0399] For example, peptides of the present invention can be produced by solid phase synthesis on a branched polylysine core matrix; these multiple antigenic peptides (MAPs) provide high purity, increased avidity, accurate chemical definition and improved safety in vaccine development. Tam et al., Proc. Natl. Acad. Sci. USA 85:5409-5413 (1988); Posnett et al., J. Biol. Chem. 263, 1719-1725 (1988).

[0400] Protocols for immunizing non-human mammals are well-established in the art, Harlow et al. (eds.), Antibodies: A Laboratory Manual, Cold Spring Harbor Laboratory (1998) (ISBN: 0879693142); Coligan et al. (eds.), Current Protocols in Immunology, John Wiley & Sons, Inc. (2001) (ISBN: 0-471-52276-7); Zola, Monoclonal Antibodies: Preparation and Use of Monoclonal Antibodies and Engineered Antibody Derivatives (Basics: From Background to Bench), Springer Verlag (2000) (ISBN: 0387915907), the disclosures of which are incorporated herein by reference, and often include multiple immunizations, either with or without adjuvants such as Freund's complete adjuvant and Freund's incomplete adjuvant.

[0401] Antibodies from nonhuman mammals can be polyclonal or monoclonal, with polyclonal antibodies having certain advantages in immunohistochemical detection of the proteins of the present invention and monoclonal antibodies having advantages in identifying and distinguishing particular epitopes of the proteins of the present invention.

[0402] Following immunization, the antibodies of the present invention can be produced using any art-accepted technique. Such techniques are well known in the art, Coligan et al. (eds.), Current Protocols in Immunology, John Wiley & Sons, Inc. (2001) (ISBN: 0-471-52276-7); Zola, Monoclonal Antibodies: Preparation and Use of Monoclonal Antibodies and Engineered Antibody Derivatives (Basics: From Background to Bench), Springer Verlag (2000) (ISBN: 0387915907); Howard et al. (eds.), Basic Methods in Antibody Production and Characterization, CRC Press (2000) (ISBN: 0849394457); Harlow et al. (eds.), Antibodies: A Laboratory Manual, Cold Spring Harbor Laboratory (1998) (ISBN: 0879693142); Davis (ed.), Monoclonal Antibody Protocols, Vol. 45, Humana Press (1995) (ISBN: 0896033082); Delves (ed.), Antibody Production: Essential Techniques, John Wiley & Son Ltd (1997) (ISBN: 0471970107); Kenney, Antibody Solution: An Antibody Methods Manual, Chapman & Hall (1997) (ISBN: 0412141914), incorporated herein by reference in their entireties, and thus need not be detailed here.

[0403] Briefly, however, such techniques include, inter alia, production of monoclonal antibodies by hybridomas and expression of antibodies or fragments or derivatives thereof from host cells engineered to express immunoglobulin genes or fragments thereof. These two methods of production are not mutually exclusive: genes encoding antibodies specific for the proteins or protein fragments of the present invention can be cloned from hybridomas and thereafter expressed in other host cells. Nor need the two necessarily be performed together: e.g., genes encoding antibodies specific for the proteins and protein fragments of the present invention can be cloned directly from B cells known to be specific for the desired protein, as further described in U.S. Pat. No. 5,627,052, the disclosure of which is incorporated herein by reference in its entirety, or from antibody-displaying phage.

[0404] Recombinant expression in host cells is particularly useful when fragments or derivatives of the antibodies of the present invention are desired.

[0405] Host cells for recombinant antibody production—either whole antibodies, antibody fragments, or antibody derivatives—can be prokaryotic or eukaryotic.

[0406] Prokaryotic hosts are particularly useful for producing phage displayed antibodies of the present invention.

[0407] The technology of phage-displayed antibodies, in which antibody variable region fragments are fused, for example, to the gene III protein (pIII) or gene VIII protein (pVIII) for display on the surface of filamentous phage, such as M13, is by now well-established, Sidhu, Curr. Opin. Biotechnol. 11(6):610-6 (2000); Griffiths et al., Curr. Opin. Biotechnol. 9(1):102-8 (1998); Hoogenboom et al., Immunotechnology, 4(1):1-20 (1998); Rader et al., Current Opinion in Biotechnology 8:503-508 (1997); Aujame et al., Human Antibodies 8:155-168 (1997); Hoogenboom, Trends in Biotechnol. 15:62-70 (1997); de Kruif et al., 17:453-455 (1996); Barbas et al., Trends in Biotechnol. 14:230-234 (1996); Winter et al., Ann. Rev. Immunol. 433-455 (1994), and techniques and protocols required to generate, propagate, screen (pan), and use the antibody fragments from such libraries have recently been compiled, Barbas et al., Phage Display: A Laboratory Manual, Cold Spring Harbor Laboratory Press (2001) (ISBN 0-87969-546-3); Kay et al. (eds.), Phage Display of Peptides and Proteins: A Laboratory Manual, Academic Press, Inc. (1996); Abelson et al. (eds.), Combinatorial Chemistry, Methods in Enzymology vol. 267, Academic Press (May 1996), the disclosures of which are incorporated herein by reference in their entireties.

[0408] Typically, phage-displayed antibody fragments are scFv fragments or Fab fragments; when desired, full length antibodies can be produced by cloning the variable regions from the displaying phage into a complete antibody and expressing the full length antibody in a further prokaryotic or a eukaryotic host cell.

[0409] Eukaryotic cells are also useful for expression of the antibodies, antibody fragments, and antibody derivatives of the present invention.

[0410] For example, antibody fragments of the present invention can be produced in Pichia pastoris, Takahashi et al., Biosci. Biotechnol. Biochem. 64(10):2138-44 (2000); Freyre et al., J. Biotechnol. 76(2-3): 157-63 (2000); Fischer et al., Biotechnol. Appl. Biochem. 30 (Pt 2): 117-20 (1999); Pennell et al., Res. Immunol. 149(6):599-603 (1998); Eldin et al., J. Immunol. Methods. 201(1):67-75 (1997); and in Saccharomyces cerevisiae, Frenken et al., Res. Immunol. 149(6):589-99 (1998); Shusta et al., Nature Biotechnol. 16(8):773-7 (1998), the disclosures of which are incorporated herein by reference in their entireties.

[0411] Antibodies, including antibody fragments and derivatives, of the present invention can also be produced in insect cells, Li et al., Protein Expr. Purif. 21(1):121-8 (2001); Ailor et al., Biotechnol. Bioeng. 58(2-3): 196-203 (1998); Hsu et al., Biotechnol. Prog. 13(1):96-104 (1997); Edelman et al., Immunology 91(1):13-9 (1997); and Nesbit et al., J. Immunol. Methods. 151(1-2): 201-8 (1992), the disclosures of which are incorporated herein by reference in their entireties.

[0412] Antibodies and fragments and derivatives thereof of the present invention can also be produced in plant cells, Giddings et al., Nature Biotechnol. 18(11):1151-5 (2000); Gavilondo et al., Biotechniques 29(1):128-38 (2000); Fischer et al., J. Biol. Regul. Homeost. Agents 14(2):83-92 (2000); Fischer et al., Biotechnol. Appl. Biochem. 30 (Pt 2): 113-6 (1999); Fischer et al., Biol. Chem. 380(7-8): 825-39 (1999); Russell, Curr. Top. Microbiol. Immunol. 240:119-38 (1999); and Ma et al., Plant Physiol. 109(2):341-6 (1995), the disclosures of which are incorporated herein by reference in their entireties.

[0413] Mammalian cells useful for recombinant expression of antibodies, antibody fragments, and antibody derivatives of the present invention include CHO cells, COS cells, 293 cells, and myeloma cells.

[0414] Verma et al., J. Immunol. Methods 216(1-2): 165-81 (1998), review and compare bacterial, yeast, insect and mammalian expression systems for expression of antibodies.

[0415] Antibodies of the present invention can also be prepared by cell free translation, as further described in Merk et al., J. Biochem. (Tokyo). 125(2):328-33 (1999) and Ryabova et al., Nature Biotechnol. 15(1):79-84 (1997), and in the milk of transgenic animals, as further described in Pollock et al., J. Immunol. Methods 231(1-2): 147-57 (1999), the disclosures of which are incorporated herein by reference in their entireties.

[0416] The invention further provides antibody fragments that bind specifically to one or more of the proteins and protein fragments of the present invention, to one or more of the proteins and protein fragments encoded by the isolated nucleic acids of the present invention, or the binding of which can be competitively inhibited by one or more of the proteins and protein fragments of the present invention or one or more of the proteins and protein fragments encoded by the isolated nucleic acids of the present invention.

[0417] Among such useful fragments are Fab, Fab′, Fv, F(ab)′₂, and single chain Fv (scFv) fragments. Other useful fragments are described in Hudson, Curr. Opin. Biotechnol. 9(4):395-402 (1998).

[0418] It is also an aspect of the present invention to provide antibody derivatives that bind specifically to one or more of the proteins and protein fragments of the present invention, to one or more of the proteins and protein fragments encoded by the isolated nucleic acids of the present invention, or the binding of which can be competitively inhibited by one or more of the proteins and protein fragments of the present invention or one or more of the proteins and protein fragments encoded by the isolated nucleic acids of the present invention.

[0419] Among such useful derivatives are chimeric, primatized, and humanized antibodies; such derivatives are less immunogenic in human beings, and thus more suitable for in vivo administration, than are unmodified antibodies from non-human mammalian species.

[0420] Chimeric antibodies typically include heavy and/or light chain variable regions (including both CDR and framework residues) of immunoglobulins of one species, typically mouse, fused to constant regions of another species, typically human. See, e.g., U.S. Pat. No. 5,807,715; Morrison et al., Proc. Natl. Acad. Sci USA.81(21):6851-5 (1984); Sharon et al., Nature 309(5966):364-7 (1984); Takeda et al., Nature 314(6010):452-4 (1985), the disclosures of which are incorporated herein by reference in their entireties. Primatized and humanized antibodies typically include heavy and/or light chain CDRs from a murine antibody grafted into a non-human primate or human antibody V region framework, usually further comprising a human constant region, Riechmann et al., Nature 332(6162):323-7 (1988); Co et al., Nature 351(6326):501-2 (1991); U.S. Pat. Nos. 6,054,297; 5,821,337; 5,770,196; 5,766,886; 5,821,123; 5,869,619; 6,180,377; 6,013,256; 5,693,761; and 6,180,370, the disclosures of which are incorporated herein by reference in their entireties.

[0421] Other useful antibody derivatives of the invention include heteromeric antibody complexes and antibody fusions, such as diabodies (bispecific antibodies), single-chain diabodies, and intrabodies.

[0422] The antibodies of the present invention, including fragments and derivatives thereof, can usefully be labeled. It is, therefore, another aspect of the present invention to provide labeled antibodies that bind specifically to one or more of the proteins and protein fragments of the present invention, to one or more of the proteins and protein fragments encoded by the isolated nucleic acids of the present invention, or the binding of which can be competitively inhibited by one or more of the proteins and protein fragments of the present invention or one or more of the proteins and protein fragments encoded by the isolated nucleic acids of the present invention.

[0423] The choice of label depends, in part, upon the desired use.

[0424] For example, when the antibodies of the present invention are used for immunohistochemical staining of tissue samples, the label can usefully be an enzyme that catalyzes production and local deposition of a detectable product.

[0425] Enzymes typically conjugated to antibodies to permit their immunohistochemical visualization are well known, and include alkaline phosphatase, β-galactosidase, glucose oxidase, horseradish peroxidase (HRP), and urease. Typical substrates for production and deposition of visually detectable products include o-nitrophenyl-beta-D-galactopyranoside (ONPG); o-phenylenediamine dihydrochloride (OPD); p-nitrophenyl phosphate (PNPP); p-nitrophenyl-beta-D-galactopryanoside (PNPG); 3′,3′-diaminobenzidine (DAB); 3-amino-9-ethylcarbazole (AEC); 4-chloro-1-naphthol (CN); 5-bromo-4-chloro-3-indolyl-phosphate (BCIP); ABTS®; BluoGal; iodonitrotetrazolium (INT); nitroblue tetrazolium chloride (NBT); phenazine methosulfate (PMS); phenolphthalein monophosphate (PMP); tetramethyl benzidine (TMB); tetranitroblue tetrazolium (TNBT); X-Gal; X-Gluc; and X-Glucoside.

[0426] Other substrates can be used to produce products for local deposition that are luminescent. For example, in the presence of hydrogen peroxide (H₂O₂), horseradish peroxidase (HRP) can catalyze the oxidation of cyclic diacylhydrazides, such as luminol. Immediately following the oxidation, the luminol is in an excited state (intermediate reaction product), which decays to the ground state by emitting light. Strong enhancement of the light emission is produced by enhancers, such as phenolic compounds. Advantages include high sensitivity, high resolution, and rapid detection without radioactivity and requiring only small amounts of antibody. See, e.g., Thorpe et al., Methods Enzymol. 133:331-53 (1986); Kricka et al., J. Immunoassay 17(1):67-83 (1996); and Lundqvist et al., J. Biolumin. Chemilumin. 10(6):353-9 (1995), the disclosures of which are incorporated herein by reference in their entireties. Kits for such enhanced chemiluminescent detection (ECL) are available commercially.

[0427] The antibodies can also be labeled using colloidal gold.

[0428] As another example, when the antibodies of the present invention are used, e.g., for flow cytometric detection, for scanning laser cytometric detection, or for fluorescent immunoassay, they can usefully be labeled with fluorophores.

[0429] There are a wide variety of fluorophore labels that can usefully be attached to the antibodies of the present invention.

[0430] For flow cytometric applications, both for extracellular detection and for intracellular detection, common useful fluorophores can be fluorescein isothiocyanate (FITC), allophycocyanin (APC), R-phycoerythrin (PE), peridinin chlorophyll protein (PerCP), Texas Red, Cy3, Cy5, fluorescence resonance energy tandem fluorophores such as PerCP-Cy5.5, PE-Cy5, PE-Cy5.5, PE-Cy7, PE-Texas Red, and APC-Cy7.

[0431] Other fluorophores include, inter alia, Alexa Fluor® 350, Alexa Fluor® 488, Alexa Fluor® 532, Alexa Fluor® 546, Alexa Fluor® 568, Alexa Fluor® 594, Alexa Fluor® 647 (monoclonal antibody labeling kits available from Molecular Probes, Inc., Eugene, Oreg., USA), BODIPY dyes, such as BODIPY 493/503, BODIPY FL, BODIPY R6G, BODIPY 530/550, BODIPY TMR, BODIPY 558/568, BODIPY 558/568, BODIPY 564/570, BODIPY 576/589, BODIPY 581/591, BODIPY TR, BODIPY 630/650, BODIPY 650/665, Cascade Blue, Cascade Yellow, Dansyl, lissamine rhodamine B, Marina Blue, Oregon Green 488, Oregon Green 514, Pacific Blue, rhodamine 6G, rhodamine green, rhodamine red, tetramethylrhodamine, Texas Red (available from Molecular Probes, Inc., Eugene, Oreg., USA), and Cy2, Cy3, Cy3.5, Cy5, Cy5.5, Cy7, all of which are also useful for fluorescently labeling the antibodies of the present invention.

[0432] For secondary detection using labeled avidin, streptavidin, captavidin or neutravidin, the antibodies of the present invention can usefully be labeled with biotin.

[0433] When the antibodies of the present invention are used, e.g., for western blotting applications, they can usefully be labeled with radioisotopes, such as ³³P, ³²P, ³⁵S, ³H, and ¹²⁵I.

[0434] As another example, when the antibodies of the present invention are used for radioimmunotherapy, the label can usefully be ²²⁸Th, ²²⁷Ac, ²²⁵Ac, ²²³Ra, ²¹³Bi, ²¹²Pb, ²¹²Bi, ²¹¹At, ²⁰³Pb, ¹⁹⁴Os, ¹⁸⁸Re, ¹⁸⁶Re, ¹⁵³Sm, ¹⁴⁹Tb, ¹³¹I, ¹²⁵I, ¹¹¹In, ¹⁰⁵Rh, ^{99m}Tc, ⁹⁷Ru, ⁹⁰Y, ⁹⁰Sr, ⁸⁸Y, ⁷²Se, ⁶⁷Cu, or ⁴⁷Sc.

[0435] As another example, when the antibodies of the present invention are to be used for in vivo diagnostic use, they can be rendered detectable by conjugation to MRI contrast agents, such as gadolinium diethylenetriaminepentaacetic acid (DTPA), Lauffer et al., Radiology 207(2):529-38 (1998), or by radioisotopic labeling.

[0436] As would be understood, use of the labels described above is not restricted to the application as for which they were mentioned.

[0437] The antibodies of the present invention, including fragments and derivatives thereof, can also be conjugated to toxins, in order to target the toxin's ablative action to cells that display and/or express the proteins of the present invention. Commonly, the antibody in such immunotoxins is conjugated to Pseudomonas exotoxin A, diphtheria toxin, shiga toxin A, anthrax toxin lethal factor, or ricin. See Hall (ed.), Immunotoxin Methods and Protocols (Methods in Molecular Biology, Vol 166), Humana Press (2000) (ISBN: 0896037754); and Frankel et al. (eds.), Clinical Applications of Immunotoxins, Springer-Verlag New York, Incorporated (1998) (ISBN: 3540640975), the disclosures of which are incorporated herein by reference in their entireties, for review.

[0438] The antibodies of the present invention can usefully be attached to a substrate, and it is, therefore, another aspect of the invention to provide antibodies that bind specifically to one or more of the proteins and protein fragments of the present invention, to one or more of the proteins and protein fragments encoded by the isolated nucleic acids of the present invention, or the binding of which can be competitively inhibited by one or more of the proteins and protein fragments of the present invention or one or more of the proteins and protein fragments encoded by the isolated nucleic acids of the present invention, attached to a substrate.

[0439] Substrates can be porous or nonporous, planar or nonplanar.

[0440] For example, the antibodies of the present invention can usefully be conjugated to filtration media, such as NHS-activated Sepharose or CNBr-activated Sepharose for purposes of immunoaffinity chromatography.

[0441] For example, the antibodies of the present invention can usefully be attached to paramagnetic microspheres, typically by biotin-streptavidin interaction, which microsphere can then be used for isolation of cells that express or display the proteins of the present invention. As another example, the antibodies of the present invention can usefully be attached to the surface of a microtiter plate for ELISA.

[0442] As noted above, the antibodies of the present invention can be produced in prokaryotic and eukaryotic cells. It is, therefore, another aspect of the present invention to provide cells that express the antibodies of the present invention, including hybridoma cells, B cells, plasma cells, and host cells recombinantly modified to express the antibodies of the present invention.

[0443] In yet a further aspect, the present invention provides aptamers evolved to bind specifically to one or more of the proteins and protein fragments of the present invention, to one or more of the proteins and protein fragments encoded by the isolated nucleic acids of the present invention, or the binding of which can be competitively inhibited by one or more of the proteins and protein fragments of the present invention or one or more of the proteins and protein fragments encoded by the isolated nucleic acids of the present invention.

[0444] HTPL Antibodies

[0445] In a first series of antibody embodiments, the invention provides antibodies, both polyclonal and monoclonal, and fragments and derivatives thereof, that bind specifically to a polypeptide having the amino acid sequence in SEQ ID NO: 3, which are full length HTPL-L proteins.

[0446] In a second series of antibody embodiments, the invention provides antibodies, both polyclonal and monoclonal, and fragments and derivatives thereof, that bind specifically to a polypeptide having the amino acid sequence in SEQ ID NO: 6, which are full length HTPL-S proteins.

[0447] Such antibodies are useful in in vitro immunoassays, such as ELISA, western blot or immunohistochemical assay of testis or other disease tissue or cells. Such antibodies are also useful in isolating and purifying HTPL proteins, including related cross-reactive proteins, by immunoprecipitation, immunoaffinity chromatography, or magnetic bead-mediated purification.

[0448] In another series of antibody embodiments, the invention provides antibodies, both polyclonal and monoclonal, and fragments and derivatives thereof, that bind specifically to a polypeptide having an amino acid sequence in SEQ ID NO: 14, which is unique to the HTPL-L isoform, and binding of which can be competitively inhibited by a polypeptide the sequence of which is given in SEQ ID NO: 3 and cannot be competitively inhibited by a polypeptide having the amino acid sequence of SEQ ID NO: 6 (the full length HTPL-S protein).

[0449] Such antibodies are useful in in vitro immunoassays, such as ELISA, western blot or immunohistochemical assay of testis or other disease tissue or cells. Such antibodies are also useful in isolating and purifying HTPL-L protein, including related cross-reactive proteins, by immunoprecipitation, immunoaffinity chromatography, or magnetic bead-mediated purification.

[0450] In another series of antibody embodiments, the invention provides antibodies, both polyclonal and monoclonal, and fragments and derivatives thereof, the specific binding of which can be competitively inhibited by the isolated proteins and polypeptides of the present invention.

[0451] In other embodiments, the invention further provides the above-described antibodies detectably labeled, and in yet other embodiments, provides the above-described antibodies attached to a substrate.

[0452] Pharmaceutical Compositions

[0453] HTPL is important in regulating male germ cell development and as a tumor suppressor; defects in HTPL expression, activity, distribution, localization, and/or solubility are a cause of human disease, which disease can manifest as a disorder of testis, or adrenal, adult and fetal liver, bone marrow, brain, kidney, lung, placenta, prostate, skeletal muscle or colon function.

[0454] Accordingly, pharmaceutical compositions comprising nucleic acids, proteins, and antibodies of the present invention, as well as mimetics, agonists, antagonists, or inhibitors of HTPL activity, can be administered as therapeutics for treatment of HTPL defects.

[0455] Thus, in another aspect, the invention provides pharmaceutical compositions comprising the nucleic acids, nucleic acid fragments, proteins, protein fusions, protein fragments, antibodies, antibody derivatives, antibody fragments, mimetics, agonists, antagonists, and inhibitors of the present invention.

[0456] Such a composition typically contains from about 0.1 to 90% by weight of a therapeutic agent of the invention formulated in and/or with a pharmaceutically acceptable carrier or excipient.

[0457] Pharmaceutical formulation is a well-established art, and is further described in Gennaro (ed.), Remington: The Science and Practice of Pharmacy, 20^{th} ed., Lippincott, Williams & Wilkins (2000) (ISBN: 0683306472); Ansel et al., Pharmaceutical Dosage Forms and Drug Delivery Systems, 7^{th} ed., Lippincott Williams & Wilkins Publishers (1999) (ISBN: 0683305727); and Kibbe (ed.), Handbook of Pharmaceutical Excipients American Pharmaceutical Association, 3^{rd} ed. (2000) (ISBN: 091733096X), the disclosures of which are incorporated herein by reference in their entireties, and thus need not be described in detail herein.

[0458] Briefly, however, formulation of the pharmaceutical compositions of the present invention will depend upon the route chosen for administration. The pharmaceutical compositions utilized in this invention can be administered by various routes including both enteral and parenteral routes, including oral, intravenous, intramuscular, subcutaneous, inhalation, topical, sublingual, rectal, intra-arterial, intramedullary, intrathecal, intraventricular, transmucosal, transdermal, intranasal, intraperitoneal, intrapulmonary, and intrauterine.

[0459] Oral dosage forms can be formulated as tablets, pills, dragees, capsules, liquids, gels, syrups, slurries, suspensions, and the like, for ingestion by the patient.

[0460] Solid formulations of the compositions for oral administration can contain suitable carriers or excipients, such as carbohydrate or protein fillers, such as sugars, including lactose, sucrose, mannitol, or sorbitol; starch from corn, wheat, rice, potato, or other plants; cellulose, such as methyl cellulose, hydroxypropylmethyl-cellulose, sodium carboxymethylcellulose, or microcrystalline cellulose; gums including arabic and tragacanth; proteins such as gelatin and collagen; inorganics, such as kaolin, calcium carbonate, dicalcium phosphate, sodium chloride; and other agents such as acacia and alginic acid.

[0461] Agents that facilitate disintegration and/or solubilization can be added, such as the cross-linked polyvinyl pyrrolidone, agar, alginic acid, or a salt thereof, such as sodium alginate, microcrystalline cellulose, corn starch, sodium starch glycolate, and alginic acid.

[0462] Tablet binders that can be used include acacia, methylcellulose, sodium carboxymethylcellulose, polyvinylpyrrolidone (Povidone™), hydroxypropyl methylcellulose, sucrose, starch and ethylcellulose.

[0463] Lubricants that can be used include magnesium stearates, stearic acid, silicone fluid, talc, waxes, oils, and colloidal silica.

[0464] Fillers, agents that facilitate disintegration and/or solubilization, tablet binders and lubricants, including the aforementioned, can be used singly or in combination.

[0465] Solid oral dosage forms need not be uniform throughout.

[0466] For example, dragee cores can be used in conjunction with suitable coatings, such as concentrated sugar solutions, which can also contain gum arabic, talc, polyvinylpyrrolidone, carbopol gel, polyethylene glycol, and/or titanium dioxide, lacquer solutions, and suitable organic solvents or solvent mixtures.

[0467] Oral dosage forms of the present invention include push-fit capsules made of gelatin, as well as soft, sealed capsules made of gelatin and a coating, such as glycerol or sorbitol. Push-fit capsules can contain active ingredients mixed with a filler or binders, such as lactose or starches, lubricants, such as talc or magnesium stearate, and, optionally, stabilizers. In soft capsules, the active compounds can be dissolved or suspended in suitable liquids, such as fatty oils, liquid, or liquid polyethylene glycol with or without stabilizers.

[0468] Additionally, dyestuffs or pigments can be added to the tablets or dragee coatings for product identification or to characterize the quantity of active compound, i.e., dosage.

[0469] Liquid formulations of the pharmaceutical compositions for oral (enteral) administration are prepared in water or other aqueous vehicles and can contain various suspending agents such as methylcellulose, alginates, tragacanth, pectin, kelgin, carrageenan, acacia, polyvinylpyrrolidone, and polyvinyl alcohol. The liquid formulations can also include solutions, emulsions, syrups and elixirs containing, together with the active compound(s), wetting agents, sweeteners, and coloring and flavoring agents.

[0470] The pharmaceutical compositions of the present invention can also be formulated for parenteral administration.

[0471] For intravenous injection, water soluble versions of the compounds of the present invention are formulated in, or if provided as a lyophilate, mixed with, a physiologically acceptable fluid vehicle, such as 5% dextrose (“D5”), physiologically buffered saline, 0.9% saline, Hanks' solution, or Ringer's solution.

[0472] Intramuscular preparations, e.g. a sterile formulation of a suitable soluble salt form of the compounds of the present invention, can be dissolved and administered in a pharmaceutical excipient such as Water-for-Injection, 0.9% saline, or 5% glucose solution. Alternatively, a suitable insoluble form of the compound can be prepared and administered as a suspension in an aqueous base or a pharmaceutically acceptable oil base, such as an ester of a long chain fatty acid (e.g., ethyl oleate), fatty oils such as sesame oil, triglycerides, or liposomes.

[0473] Parenteral formulations of the compositions can contain various carriers such as vegetable oils, dimethylacetamide, dimethylformamide, ethyl lactate, ethyl carbonate, isopropyl myristate, ethanol, polyols (glycerol, propylene glycol, liquid polyethylene glycol, and the like).

[0474] Aqueous injection suspensions can also contain substances that increase the viscosity of the suspension, such as sodium carboxymethyl cellulose, sorbitol, or dextran. Non-lipid polycationic amino polymers can also be used for delivery. Optionally, the suspension can also contain suitable stabilizers or agents that increase the solubility of the compounds to allow for the preparation of highly concentrated solutions.

[0475] Pharmaceutical compositions of the present invention can also be formulated to permit injectable, long-term, deposition.

[0476] The pharmaceutical compositions of the present invention can be administered topically.

[0477] A topical semi-solid ointment formulation typically contains a concentration of the active ingredient from about 1 to 20%, e.g., 5 to 10%, in a carrier such as a pharmaceutical cream base. Various formulations for topical use include drops, tinctures, lotions, creams, solutions, and ointments containing the active ingredient and various supports and vehicles. In other transdermal formulations, typically in patch-delivered formulations, the pharmaceutically active compound is formulated with one or more skin penetrants, such as 2-N-methyl-pyrrolidone (NMP) or Azone.

[0478] Inhalation formulations can also readily be formulated. For inhalation, various powder and liquid formulations can be prepared.

[0479] The pharmaceutically active compound in the pharmaceutical compositions of the present inention can be provided as the salt of a variety of acids, including but not limited to hydrochloric, sulfuric, acetic, lactic, tartaric, malic, and succinic acid. Salts tend to be more soluble in aqueous or other protonic solvents than are the corresponding free base forms.

[0480] After pharmaceutical compositions have been prepared, they are packaged in an appropriate container and labeled for treatment of an indicated condition.

[0481] The active compound will be present in an amount effective to achieve the intended purpose. The determination of an effective dose is well within the capability of those skilled in the art.

[0482] A “therapeutically effective dose” refers to that amount of active ingredient—for example HTPL protein, fusion protein, or fragments thereof, antibodies specific for HTPL, agonists, antagonists or inhibitors of HTPL—which ameliorates the signs or symptoms of the disease or prevents progression thereof; as would be understood in the medical arts, cure, although desired, is not required.

[0483] The therapeutically effective dose of the pharmaceutical agents of the present invention can be estimated initially by in vitro tests, such as cell culture assays, followed by assay in model animals, usually mice, rats, rabbits, dogs, or pigs. The animal model can also be used to determine an initial useful concentration range and route of administration.

[0484] For example, the ED50 (the dose therapeutically effective in 50% of the population) and LD50 (the dose lethal to 50% of the population) can be determined in one or more cell culture of animal model systems. The dose ratio of toxic to therapeutic effects is the therapeutic index, which can be expressed as LD50/ED50. Pharmaceutical compositions that exhibit large therapeutic indices are particularly useful.

[0485] The data obtained from cell culture assays and animal studies is used in formulating an initial dosage range for human use, and preferably provides a range of circulating concentrations that includes the ED50 with little or no toxicity. After administration, or between successive administrations, the circulating concentration of active agent varies within this range depending upon pharmacokinetic factors well known in the art, such as the dosage form employed, sensitivity of the patient, and the route of administration.

[0486] The exact dosage will be determined by the practitioner, in light of factors specific to the subject requiring treatment. Factors that can be taken into account by the practitioner include the severity of the disease state, general health of the subject, age, weight, gender of the subject, diet, time and frequency of administration, drug combination(s), reaction sensitivities, and tolerance/response to therapy. Long-acting pharmaceutical compositions can be administered every 3 to 4 days, every week, or once every two weeks depending on half-life and clearance rate of the particular formulation.

[0487] Normal dosage amounts may vary from 0.1 to 100,000 micrograms, up to a total dose of about 1 g, depending upon the route of administration. Where the therapeutic agent is a protein or antibody of the present invention, the therapeutic protein or antibody agent typically is administered at a daily dosage of 0.01 mg to 30 mg/kg of body weight of the patient (e.g., 1 mg/kg to 5 mg/kg). The pharmaceutical formulation can be administered in multiple doses per day, if desired, to achieve the total desired daily dose.

[0488] Guidance as to particular dosages and methods of delivery is provided in the literature and generally available to practitioners in the art. Those skilled in the art will employ different formulations for nucleotides than for proteins or their inhibitors. Similarly, delivery of polynucleotides or polypeptides will be specific to particular cells, conditions, locations, etc.

[0489] Conventional methods, known to those of ordinary skill in the art of medicine, can be used to administer the pharmaceutical formulation(s) of the present invention to the patient. The pharmaceutical compositions of the present invention can be administered alone, or in combination with other therapeutic agents or interventions.

[0490] Therapeutic Methods

[0491] The present invention further provides methods of treating subjects having defects in HTPL—e.g., in expression, activity, distribution, localization, and/or solubility of HTPL—which can manifest as a disorder of testis, or adrenal, adult and fetal liver, bone marrow, brain, kidney, lung, placenta, prostate, skeletal muscle or colon function. As used herein, “treating” includes all medically-acceptable types of therapeutic intervention, including palliation and prophylaxis (prevention) of disease.

[0492] In one embodiment of the therapeutic methods of the present invention, a therapeutically effective amount of a pharmaceutical composition comprising HTPL protein, fusion, fragment or derivative thereof is administered to a subject with a clinically-significant HTPL defect.

[0493] Protein compositions are administered, for example, to complement a deficiency in native HTPL. In other embodiments, protein compositions are administered as a vaccine to elicit a humoral and/or cellular immune response to HTPL. The immune response can be used to modulate activity of HTPL or, depending on the immunogen, to immunize against aberrant or aberrantly expressed forms, such as mutant or inappropriately expressed isoforms. In yet other embodiments, protein fusions having a toxic moiety are administered to ablate cells that aberrantly accumulate HTPL.

[0494] In another embodiment of the therapeutic methods of the present invention, a therapeutically effective amount of a pharmaceutical composition comprising nucleic acid of the present invention is administered. The nucleic acid can be delivered in a vector that drives expression of HTPL protein, fusion, or fragment thereof, or without such vector.

[0495] Nucleic acid compositions that can drive expression of HTPL are administered, for example, to complement a deficiency in native HTPL, or as DNA vaccines. Expression vectors derived from virus, replication deficient retroviruses, adenovirus, adeno-associated (AAV) virus, herpes virus, or vaccinia virus can be used—see, e.g., Cid-Arregui (ed.), Viral Vectors: Basic Science and Gene Therapy, Eaton Publishing Co., 2000 (ISBN: 188129935X)— as can plasmids.

[0496] Antisense nucleic acid compositions, or vectors that drive expression of HTPL antisense nucleic acids, are administered to downregulate transcription and/or translation of HTPL in circumstances in which excessive production, or production of aberrant protein, is the pathophysiologic basis of disease.

[0497] Antisense compositions useful in therapy can have sequence that is complementary to coding or to noncoding regions of the HTPL gene. For example, oligonucleotides derived from the transcription initiation site, e.g., between positions −10 and +10 from the start site, are particularly useful.

[0498] Catalytic antisense compositions, such as ribozymes, that are capable of sequence-specific hybridization to HTPL transcripts, are also useful in therapy. See, e.g., Phylactou, Adv. Drug Deliv. Rev. 44(2-3): 97-108 (2000); Phylactou et al., Hum. Mol. Genet. 7(10):1649-53 (1998); Rossi, Ciba Found. Symp. 209:195-204 (1997); and Sigurdsson et al., Trends Biotechnol. 13(8):286-9 (1995), the disclosures of which are incorporated herein by reference in their entireties.

[0499] Other nucleic acids useful in the therapeutic methods of the present invention are those that are capable of triplex helix formation in or near the HTPL genomic locus. Such triplexing oligonucleotides are able to inhibit transcription, Intody et al., Nucleic Acids Res. 28(21):4283-90 (2000); McGuffie et al., Cancer Res. 60(14):3790-9 (2000), the disclosures of which are incorporated herein by reference, and pharmaceutical compositions comprising such triplex forming oligos (TFOs) are administered in circumstances in which excessive production, or production of aberrant protein, is a pathophysiologic basis of disease.

[0500] In another embodiment of the therapeutic methods of the present invention, a therapeutically effective amount of a pharmaceutical composition comprising an antibody (including fragment or derivative thereof) of the present invention is administered. As is well known, antibody compositions are administered, for example, to antagonize activity of HTPL, or to target therapeutic agents to sites of HTPL presence and/or accumulation.

[0501] In another embodiment of the therapeutic methods of the present invention, a pharmaceutical composition comprising a non-antibody antagonist of HTPL is administered. Antagonists of HTPL can be produced using methods generally known in the art. In particular, purified HTPL can be used to screen libraries of pharmaceutical agents, often combinatorial libraries of small molecules, to identify those that specifically bind and antagonize at least one activity of HTPL.

[0502] In other embodiments a pharmaceutical composition comprising an agonist of HTPL is administered. Agonists can be identified using methods analogous to those used to identify antagonists.

[0503] In still other therapeutic methods of the present invention, pharmaceutical compositions comprising host cells that express HTPL, fusions, or fragments thereof can be administered. In such cases, the cells are typically autologous, so as to circumvent xenogeneic or allotypic rejection, and are administered to complement defects in HTPL production or activity.

[0504] In other embodiments, pharmaceutical compositions comprising the HTPL proteins, nucleic acids, antibodies, antagonists, and agonists of the present invention can be administered in combination with other appropriate therapeutic agents. Selection of the appropriate agents for use in combination therapy can be made by one of ordinary skill in the art according to conventional pharmaceutical principles. The combination of therapeutic agents or approaches can act additively or synergistically to effect the treatment or prevention of the various disorders described above, providing greater therapeutic efficacy and/or permitting use of the pharmaceutical compositions of the present invention using lower dosages, reducing the potential for adverse side effects.

[0505] Transgenic Animals and Cells

[0506] In another aspect, the invention provides transgenic cells and non-human organisms comprising HTPL isoform nucleic acids, and transgenic cells and non-human organisms with targeted disruption of the endogenous orthologue of the human HTPL gene.

[0507] The cells can be embryonic stem cells or somatic cells. The transgenic non-human organisms can be chimeric, nonchimeric heterozygotes, and nonchimeric homozygotes.

[0508] Diagnostic Methods

[0509] The nucleic acids of the present invention can be used as nucleic acid probes to assess the levels of HTPL mRNA in testis or other disease tissue or cells, and antibodies of the present invention can be used to assess the expression levels of HTPL proteins in testis or other disease tissue or cells to diagnose male infertility or cancer.

[0510] The following examples are offered for purpose of illustration, not limitation.

### EXAMPLE 1

### Identification and Characterization of cDNAs Encoding HTPL Proteins

[0511] Predicating our gene discovery efforts on use of genome-derived single exon probes and hybridization to genome-derived single exon microarrays—an approach that we have previously demonstrated will readily identify novel genes that have proven refractory to mRNA-based identification efforts—we identified an exon in raw human genomic sequence that is particularly expressed in human adrenal, adult and fetal liver, bone marrow, brain, kidney, lung, placenta and prostate.

[0512] Briefly, bioinformatic algorithms were applied to human genomic sequence data to identify putative exons. Each of the predicted exons was amplified from genomic DNA, typically centering the putative coding sequence within a larger amplicon that included flanking noncoding sequence. These genome-derived single exon probes were arrayed on a support and expression of the bioinformatically predicted exons assessed through a series of simultaneous two-color hybridizations to the genome-derived single exon microarrays.

[0513] The approach and procedures are further described in detail in Penn et al., “Mining the Human Genome using Microarrays of Open Reading Frames,” Nature Genetics 26:315-318 (2000); commonly owned and copending U.S. patent application Ser. No. 09/864,761, filed May 23, 2001, Ser. No. 09/774,203, filed Jan. 29, 2001, and Ser. No. 09/632,366, filed Aug. 3, 2000, the disclosures of which are incorporated herein by reference in their entireties.

[0514] Using a graphical display particularly designed to facilitate computerized query of the resulting exon-specific expression data, as further described in commonly owned and copending U.S. patent application Ser. No. 09/864,761, filed May 23, 2001, Ser. No. 09/774,203, filed Jan. 29, 2001 and 09/632,366, filed Aug. 3, 2000, the disclosures of which are incorporated herein by reference in their entireties, one exon was identified that is expressed in all the human tissues tested; subsequent analysis revealed that the exon represent a gene.

[0515] Table 1 summarizes the microarray expression data obtained using genome-derived single exon probe corresponding to exon four. The probe was completely sequenced on both strands prior to its use on a genome-derived single exon microarray; sequencing confirmed the exact chemical structure of the probe. An added benefit of sequencing is that it placed us in possession of a set of single base-incremented fragments of the sequenced nucleic acid, starting from the sequencing primer's 3′ OH. (Since the single exon probe was first obtained by PCR amplification from genomic DNA, we were of course additionally in possession of an even larger set of single base incremented fragments of the single exon probe, each fragment corresponding to an extension product from one of the two amplification primers.).

[0516] Signals and expression ratios are normalized values measured and calculated as further described in commonly owned and copending U.S. patent application Ser. No. 09/864,761, filed May 23, 2001, Ser. No. 09/774,203, filed Jan. 29, 2001, Ser. No. 09/632,366, filed Aug. 3, 2000, and U.S. provisional patent application No. 60/207,456, filed May 26, 2000, the disclosures of which are incorporated herein by reference in their entireties.

TABLE 1
Expression Analysis
Genome-Derived Single Exon Microarray

Amplicon 86654, Exon 4

| (TISSUE) | Signal | Ratio |
|---|---|---|
| Adrenal | 1.02 | 1.06 |
| adult liver | 0.95 | 1.00 |
| bone marrow | 1.63 | 1.01 |
| Brain | 1.20 | 1.27 |
| fetal liver | 1.22 | −1.22 |
| Kidney | 0.90 | 1.07 |
| Lung | 0.96 | −1.11 |
| Placenta | 1.02 | −1.05 |
| Prostate | 0.85 | 1.18 |

[0517] As shown in Table 1, low level expression of exon four was seen in adrenal, adult and fetal liver, bone marrow, brain, kidney, lung, placenta and prostate. Low level expression of HTPL in these tissues was further confirmed by RT-PCR analysis (see below).

[0518] Rapid Amplification of cDNA ends (RACE, Clontech Laboratories, Palo Alto, Calif.) and direct RT-PCR were used to obtain the coding region of the human cDNA sequence. The final pair of primers used to amplify the 3.3 kb transcript were: 62NF3 (5′-CAGGAAACCGTCTGGTGGGATCTC-3′; SEQ ID NO: 4801) and 62487Rend (5′-CTGAGACGGAGTCTCATTCTTGTCACC-3′; SEQ ID NO: 4802).

[0519] Human testis Marathon ready cDNA (Clontech Laboratories) was used to clone the entire coding region. The PCR parameters were as follows: 94° C. 1 min; (94° C. 10 seconds; 64° C. 30 seconds; 72° C. 3 min.) for 35 cycles. The PCR reaction composition was as follows: 5 ul of cDNA; 5 ul of 10× amplification buffer; 1 ul dNTP (10 M); 3 ul of primer pairs; 1 ul of Taq polymerase Mix and 35 ul double distilled water.

[0520] The PCR product was cloned into a pGEM-Teasy vector and inserts of multiple clones were sequenced on both strands using a MegaBACE™ automatic sequencer (Amersham Biosciences, Sunnyvale, Calif.). Single base pair sequence changes were identified between two groups of clones, and each group was recognized as one isoform. The presence of two isoforms was confirmed by the presence of two genomic clones (see below), in the public database, with the same single base pair sequence changes between them. For reasons described below, we named the two isoforms HTPL-L and HTPL-S. Sequencing both strands provided us with the exact chemical structure of the cDNA, which are shown in FIG. 3 and FIG. 4 and further presented in the SEQUENCE LISTING as SEQ ID NOs: 1 and 4, and placed us in actual physical possession of the entire set of single-base incremented fragments of the sequenced clones, starting at the 5′ and 3′ termini.

[0521] As shown in FIG. 3, the HTPL-L cDNA spans 3296 nucleotides and contains an open reading frame from nucleotide 78 through and including nt 2942 (inclusive of termination codon), predicting a protein of 954 amino acids with a (posttranslationally unmodified) molecular weight of 107.6 kD. The clone appears full length, with the reading frame opening starting with a methionine and terminating with a stop codon.

[0522] As shown in FIG. 4, the HTPL-S cDNA span 3298 nucleotides and contains an open reading frame from nucleotide 78 through and including nt 2381 (inclusive of termination codon), predicting a protein of 767 amino acids with a (posttranslationally unmodified) molecular weight of 86.9 kD. The clone appears full length, with the reading frame opening starting with a methionine and terminating with a stop codon.

[0523] BLAST query of genomic sequence identified one BAC, spanning 16.7 kb, which constitutes the minimum set of clones encompassing the cDNA sequences. Based upon the known origin of the BAC (GenBank accession number AC005875.2), the HTPL gene can be mapped to human chromosome 10p12.1.

[0524] Comparison of the cDNA and genomic sequences identified four exons for HTPL. Exon organization for HTPL is listed in Table 2.

TABLE 2
HTPL Exon Structure

| Exon no. | cDNA range | genomic range | BAC accession |
|---|---|---|---|
| 1 | 1-1166 | 100221-99056 | AC005875.2 |
| 2 | 1167-1288 | 97823-97702 | |
| 3 | 1289-1434 | 89251-89106 | |
| 4 | 1435-3296 | 85101-83240 | |
| | (HTPL-L) | | |
| | 1435-3298 | 85101-83238 | |
| | (HTPL-S) | | |

[0525] FIG. 2 schematizes the exon organization of the HTPL gene.

[0526] At the top is shown the bacterial artificial chromosome (BAC), with GenBank accession number (AC005875.2), that span the HTPL locus. The genome-derived single-exon probe first used to demonstrate expression from this locus is shown below the BAC and labeled “500”. The 500 bp probe includes sequence drawn solely from exon four.

[0527] As shown in FIG. 2, two HTPL isoforms have been identified. Both isoforms contain four exons, with a few single base pair differences between them (FIG. 3 and FIG. 4). Indeed, BAC AC005875.2 contains the same exonic sequence as HTPL-L, while BAC AL355493.1 contains the same exonic sequence as HTPL-S. The longer isoform, HTPL-L, encodes a protein of 954 amino acids that has a predicted molecular weight, prior to any post-translational modification, of 107.6 kD. One of the single base pair changes in the shorter form (HTPL-S) introduces a premature stop codon at position 2379 of the HTPL-S cDNA. HTPL-S, therefore, encodes a shortened protein of 767 amino acids that has a predicted molecular weight, prior to any post-translational modification, of 86.9 kD. Both cDNA clones appear full length, with the open reading frame starting with a methionine and terminating with a stop codon.

[0528] As further discussed in the examples herein, expression of HTPL was assessed using hybridization to genome-derived single exon microarrays. Microarray analysis of the fourth exon showed low level expression in all tissues tested, including adrenal, adult liver, bone marrow, brain, fetal liver, kidney, lung, placenta and prostate. This was confirmed by RT-PCR. RT-PCR also detected strong expression in testis and weak expression in colon and skeletal muscle (see Example 3).

[0529] The sequence of the HTPL cDNA was used as a BLAST query into the GenBank nr and dbEst databases. The nr database includes all non-redundant GenBank coding sequence translations, sequences derived from the 3-dimensional structures in the Brookhaven Protein Data Bank (PDB), sequences from SwissProt, sequences from the protein information resource (PIR), and sequences from protein research foundation (PRF). The dbEst (database of expressed sequence tags) includes ESTs, short, single pass read cDNA (mRNA) sequences, and cDNA sequences from differential display experiments and RACE experiments.

[0530] BLAST search identified a single human EST (AW665031.1), a single mouse EST (AV280614.1), and a single pig EST (AW436721.1) as having sequence closely related to HTPL.

[0531] Globally, the human HTPL proteins resemble a putative mouse transcript (GenBank accession: BAB29848, the HTPL-L protein with 66% amino acid identity and 78% amino acid similarity over the entire open reading frame).

[0532] Motif searches using Pfam (http://pfam.wustl.edu), SMART (http://smart.embl-heidelberg.de), and PROSITE pattern and profile databases (http://www.expasy.ch/prosite), identified several known domains shared with Patched, including the Patched domain and the Sterol-sensing domain.

[0533] FIG. 1 shows the domain structure of HTPL-L and HTPL-S as well as the alignment of the Patched domain of HTPL-L with that of other protein.

[0534] As schematized in FIG. 1, HTPL shares an overall structural organization with the Patched protein. The shared structural features strongly imply that HTPL plays a role similar to that of Patched, in male germ cell development, and is a potential tumor suppressor.

[0535] Like Patched, HTPL-L contains a Patched domain (http://pfam.wustl.edu/hmmsearch.shtml), a Sterol-sensing domain (SSD, http://motif.genome.ad.jp/) and twelve transmembrane domains (http://smart.embl-heidelberg.de/smart/show_motifs.pl). The Patched domain in HTPL-L covers amino acid sequences 166-952 of HTPL-L. The SSD domain in HTPL-L covers amino acid sequences 383-540 of HTPL-L. The presence of these domains in HTPL-L suggest that HTPL-L, like Patched and other Patched domain containing proteins, is involved in the Hedgehog signaling pathway (see background section). Because of the premature stop of protein translation, HTPL-S contains a partial Patched domain, a complete Sterol-sensing motif and seven transmembrane domains. The presence of these domains in HTPL-S suggests that HTPL-S is also involved in the Hedgehog signaling pathway.

[0536] Other signatures of the newly isolated HTPL proteins were identified by searching the PROSITE database (http://www.expasy.ch/tools/scnpsitl.html), and the list below is for both HTPL-L and HTPL-S unless specified otherwise. These include seven N-glycosylation sites (192-195, 275-278, 279-282, 530-533, 678-681, 692-695 and 737-740), one cAMP- and cGMP-dependent protein kinase phosphorylation site (201-204), seven protein kinase C phosphorylation sites (194-196, 200-202, 508-510, 561-563, 662-664, 746-748, and 759-761; plus one for HTPL-L at 800-802), twelve Casein kinase II phosphorylation sites (19-22, 36-39, 62-65, 79-82, 190-193, 215-218, 219-222, 225-228, 230-233, 572-575, 597-600, and 740-743), two tyrosine kinase phosphorylation site (329-335, and 681-688; plus one for HTPL-L at 887-893), four N-myristoylation sites (307-312, 418-4223, 504-509, and 535-540; plus one for HTPL-L at 935-940), and a single amidation site at 541-544.

[0537] Possession of the genomic sequence permitted search for promoter and other control sequences for the HTPL gene. A putative transcriptional control region, inclusive of promoter and downstream elements, was defined as 1 kb around the transcription start site, itself defined as the first nucleotide of the HTPL cDNA clone. The region, drawn from sequence of BAC AC005875.2, has the sequence given in SEQ ID NO: 23, which lists 1000 nucleotides before the transcription start site.

[0538] Transcription factor binding sites were identified using a web based program (http://motif.genome.ad.jp/), including binding sites for homeo domain factor Nkx-2.5/Csx (625-631 bp), for USF (891-898 bp) and for CdxA (399-405 and 612-618 bp, with numbering according to SEQ ID NO: 23), amongst others.

[0539] We have thus identified a newly described human gene, HTPL, which shares certain protein domains and an overall structural organization with Patched. The shared structural features strongly imply that the HTPL protein plays a role similar to Patched, in the hedgehog signaling pathway, functioning as a potential tumor suppressor and in germ cell development. This makes the HTPL proteins and nucleic acids clinically useful diagnostic markers and potential therapeutic agents for male infertility and cancer.

### EXAMPLE 2

### Preparation and Labeling of Useful Fragments of HTPL

[0540] Useful fragments of HTPL are produced by PCR, using standard techniques, or solid phase chemical synthesis using an automated nucleic acid synthesizer. Each fragment is sequenced, confirming the exact chemical structure thereof.

[0541] The exact chemical structure of preferred fragments is provided in the attached SEQUENCE LISTING, the disclosure of which is incorporated herein by reference in its entirety. The following summary identifies the fragments whose structures are more fully described in the SEQUENCE LISTING:
[0542] SEQ ID NO: 1 (nt, full length HTPL-L cDNA)
[0543] SEQ ID NO: 2 (nt, cDNA ORF of HTPL-L)
[0544] SEQ ID NO: 3 (aa, full length HTPL-L protein)
[0545] SEQ ID NO: 4 (nt, full length HTPL-S cDNA)
[0546] SEQ ID NO: 5 (nt, cDNA ORF of HTPL-S)
[0547] SEQ ID NO: 6 (aa, full length HTPL-S protein)
[0548] SEQ ID NO: 7 (nt, (nt 1-2021) portion of HTPL-L)
[0549] SEQ ID NO: 8 (nt; 5′ UT portion of SEQ ID NO: 7)
[0550] SEQ ID NO: 9 (nt, coding region of SEQ ID NO: 7)
[0551] SEQ ID NO: 10 (aa, (aa 1-648) CDS entirely within SEQ ID NO: 9)
[0552] SEQ ID NO: 11 (nt, (nt 2637-3041) portion of HTPL-L)
[0553] SEQ ID NO: 12 (nt, coding region of SEQ ID NO: 11)
[0554] SEQ ID NO: 13 (nt, 3′ UT portion of SEQ ID NO: 11)
[0555] SEQ ID NO: 14 (aa, (aa 854-954) CDS entirely within SEQ ID NO: 12)
[0556] SEQ ID NO: 15-18 (nt, exons 1-4 of HTPL-L)
[0557] SEQ ID NO: 19-22 (nt, 500 bp genomic amplicons centered about exons 1-4 of HTPL-L)
[0558] SEQ ID NO: 23 (nt, 1000 bp putative promoter of HTPL)
[0559] SEQ ID NOs: 24-2028 (nt, 17-mers scanning SEQ ID NO: 7)
[0560] SEQ ID NOs: 2029-4025 (nt, 25-mers scanning SEQ ID NO: 7)
[0561] SEQ ID NOs: 4026-4414 (nt, 17-mers scanning SEQ ID NO: 11)
[0562] SEQ ID NOs: 4415-4795 (nt, 25-mers scanning SEQ ID NO: 11)
[0563] SEQ ID NO: 4796 (nt, (nt 1-2021) portion of HTPL-S)
[0564] SEQ ID NO: 4797 (nt, 5′ UT portion of SEQ ID NO: 4796)
[0565] SEQ ID NO: 4798 (nt, coding region of SEQ ID NO: 4796)
[0566] SEQ ID NO: 4799 (aa, (aa 1-648) CDS entirely within SEQ ID NO: 4798)
[0567] SEQ ID NO: 4800 (nt, (nt 2637-3041) portion of HTPL-S)
[0568] SEQ ID NO: 4801 (nt, primer 62NF3 for cloning of HTPL)
[0569] SEQ ID NO: 4802 (nt, primer 62487Rend for cloning of HTPL)
[0570] SEQ ID NO: 4803 (nt, primer 62487Pu for RT-PCR analysis of HTPL)
[0571] SEQ ID NO: 4804 (nt, primer 62487Pd for RT-PCR analysis of HTPL)

[0572] Upon confirmation of the exact structure, each of the above-described nucleic acids of confirmed structure is recognized to be immediately useful as a HTPL-specific probe.

[0573] For use as labeled nucleic acid probes, the above-described HTPL nucleic acids are separately labeled by random priming. As is well known in the art of molecular biology, random priming places the investigator in possession of a near-complete set of labeled fragments of the template of varying length and varying starting nucleotide.

[0574] The labeled probes are used to identify the HTPL gene on a Southern blot, and are used to measure expression of HTPL mRNA on a northern blot and by RT-PCR, using standard techniques.

### EXAMPLE 3

### Expression Analysis of HTPL by RT-PCR

[0575] The Advantage 2 PCR amplification kit and PCR cDNA of different human tissues were obtained from Clontech Laboratories Inc. (Palo Alto, Calif.). The PCR parameters were set-up as follows, 94° C. 15 seconds; 59° C. 30 seconds; 72° C. 40 seconds for 35 cycles. The PCR composition is as follows: 0.5 ul of cDNA; 2.5 ul of 10× amplification buffer; 0.5 ul dNTP (10 M); 1 ul of primer pairs (10 M each; SEQ ID NO: 4803 and SEQ ID NO: 4804); 0.5 ul of Advantage polymerase Mix in 25 ul reaction mixture. The amplified DNA products were resolved in 1.2% agarose gel in TAE buffer. The gel was scanned using Typhoon™ Imaging System (Amersham Biosciences). HTPL is strongly expressed in testis, weakly expressed in skeletal muscle, bone marrow, lung, liver, kidney, colon and placenta, while hardly expressed in brain, heart and uterus (FIG. 5).

### EXAMPLE 4

### Production of HTPL Protein

[0576] The full length HTPL cDNA clone is cloned into the mammalian expression vector pcDNA3.1/HISA (Invitrogen, Carlsbad, Calif., USA), transfected into COS7 cells, transfectants selected with G418, and protein expression in transfectants confirmed by detection of the anti-Xpress™ epitope according to manufacturer's instructions. Protein is purified using immobilized metal affinity chromatography and vector-encoded protein sequence is then removed with enterokinase, per manufacturer's instructions, followed by gel filtration and/or HPLC.

[0577] Following epitope tag removal, HTPL protein is present at a concentration of at least 70%, measured on a weight basis with respect to total protein (i.e., w/w), and is free of acrylamide monomers, bis acrylamide monomers, polyacrylamide and ampholytes. Further HPLC purification provides HTPL protein at a concentration of at least 95%, measured on a weight basis with respect to total protein (i.e., w/w).

### EXAMPLE 5

### Production of Anti-HTPL Antibody

[0578] Purified proteins prepared as in Example 4 are conjugated to carrier proteins and used to prepare murine monoclonal antibodies by standard techniques. Initial screening with the unconjugated purified proteins, followed by competitive inhibition screening using peptide fragments of the HTPL, identifies monoclonal antibodies with specificity for HTPL.

### EXAMPLE 6

### Use of HTPL Probes and Antibodies for Diagnosis of Male Infertility and Tumor

[0579] After informed consent is obtained, samples are drawn from testis or other disease tissue or cells and tested for HTPL mRNA levels by standard techniques and tested additionally for HTPL protein levels using anti-HTPL antibodies in a standard ELISA.

### EXAMPLE 7

### Use of HTPL Nucleic Acids, Proteins, and Antibodies in Therapy

[0580] Once over-expression of HTPL is detected in patients, HTPL antisense RNA or HTPL-specific antibody is introduced into disease cells to reduce the amount of the protein.

[0581] Once mutations of HTPL have been detected in patients, normal HTPL is reintroduced into the patient's disease cells by introduction of expression vectors that drive HTPL expression or by introducing HTPL proteins into cells. Antibodies for the mutated forms of HTPL are used to block the function of the abnormal forms of the protein.

### EXAMPLE 8

### HTPL Disease Associations

[0582] Diseases that map to the HTPL chromosomal region are shown in Table 3:

TABLE 3
Diseases mapped to human chromosome 10p12.1 (HTPL region).

| | | chromosomal |
|---|---|---|
| mim_num | Disease | location |
| 601188 | PROSTATE ADENOCARCINOMA 1 | 10pter-q11 |
| 603188 | SUSCEPTIBILITY TO OBESITY | 10p |
| 604401 | ARRHYTHMOGENIC RIGHT | 10p14-p12 |
| | VENTRICULAR | |
| | CARDIOMYOPATHY 6 | |
| 600964 | REFSUM DISEASE WITH INCREASED | 10pter-p11.2 |
| | PIPECOLICACIDEMIA | |
| 602432 | OPEN ANGLE GLAUCOMA 1 | Chr.10 |

[0583] Prostate cancer is the second leading cause of male cancer deaths in the United States (http://www.ncbi.nlm.nih.gov/entrez/). A genetic locus, designated prostate adenocarcinoma 1 (PAC1), is involved in tumor suppression of human prostate carcinoma. Sanchez et al., Proc. Nat. Acad. Sci. 93:2551-2556 (1996). HTPL is a candidate gene for PAC1 as it maps to the same chromosomal region. Alternatively, mutations of HTPL could also lead to other diseases, such as those listed in Table 3.

[0584] All patents, patent publications, and other published references mentioned herein are hereby incorporated by reference in their entireties as if each had been individually and specifically incorporated by reference herein. While preferred illustrative embodiments of the present invention are described, one skilled in the art will appreciate that the present invention can be practiced by other than the described embodiments, which are presented for purposes of illustration only and not by way of limitation. The present invention is limited only by the claims that follow.

The application's sequence listing, which the Patent Office published only in electronic form, follows.

SEQUENCE LISTING (4809 sequences)

SEQ ID NO: 1 - DNA, 3296 bp, Homo sapiens
caggaaaccgtctggtgggatctccgcagctgcttttcacctgctgttcctcctgcgcttcctaagaggaagaatcaatgccgtgggtggagcccaagcccaggccggggccggagcagaagcccaagctcaccaaaccggactctgccaccgggccgcagtggtaccaggaatctcaggaatcggagtcggaaggcaagcagccacccccgggacccctggcacccccgaaatcccccgaaccctcaggacccctggcgtcggagcaggatgcacccctgccagagggggacgatgcacccccccggccgtcgatgctggacgatgcaccccgcctgccgctggagctggacgatgcacccctgccggaggaggaaacccccgaacccacggccatctgcaggcaccggcaccgctgtcacaccgactgcctagaggggctgctgtcccgcaccttccagtggctggggtggcaggtgggcgcgcacccctggatcttcctgctggcgcccttgatgctgacagccgcgctgggcaccggcttcctgtacctacccaaggacgaagaggaagacctagaggagcattacacccctgtggggagcccggccaaggcggagcggcgcttcgtgcagggccatttcaccaccaacgactcctaccgcttctccgcctccaggaggagcaccgaagccaatttcgtctcgcttctggtggtctcctacagcgactcactgctggacccagctacctttgcagaagtcagcaaactggacggcgcggtgcaggatctgcgcgtggcgcgggaaaagggaagccagatccagtaccagcaggtgtgcgcgaggtacagggcgctctgcgtgccccccaacccgatcctgtacgcctggcaggtgaacaaaacgctcaacctgagcagcatctccttccccgcctacaaccacggcaggcatcccctctacctgaccggcttcttcggaggatacatcttggggggcagcctaggaatgggccagttactcctgcgggccaaagccatgcggctgctgtactacctgaagaccgaggaccctgagtacgacgtgcagagcaagcagtggctcacccatttgctcgatcaatttaccaacattaagaacatcttggccttgaaaaaaattgaggtagtccactttacatcgctttccagacaactggaatttgaggcaacttctgtgactgtgatccctgtgtttcacctggcatacattctcatcattctgtttgcagtcacatcatgctttaggtttgactgcatacgaaacaaaatgtgtgttgcggcctttggagtgatttctgctttcttggcagtggtgagcggctttggcctgctgttgcacattggggtgccatttgtcatcatagttgccaattcaccatttcttattctaggtgttggggtcgatgacatgtttatcatgatttctgcctggcataagaccaaccttgcaggtgacatacgagagcggatgtccaatgtctattcaaaagcggcagtgtctattacaatcaccaccatcactaacatcctggccttatatacagggattatgagctcttttaggtccgtacaatgtttttgcatctatacaggaacgaccctgttattttgctatttttataacatcacgtgttttggagcatttatggccttggatggtaaaagagaagtagtctgcctatgctggttgaaaaaggctgacccaaaatggccctcatttaaaaagttctgctgtttcccatttggttctgtcccagatgaacatggaactgatatccatccaatgagtttgttttttagagactattttggcccctttctcacaaggagtgagtccaagtattttgtagtctttatatatgttttgtacatcataagcagtatatatgggtgtttccatgtgcaggaaggtttagaccttcgaaatctggcaagtgacgattcctacatcacaccatattttaacgtagaggagaattatttttcagattatggtcccagggttatggttattgttactaaaaaagttgactactgggataaagatgttaggcaaaaactggaaaactgtactaaaatttttgaaaaaaatgtctatgtagataaaaatcttacagagttttggttagatgcatatgtgcaatatttaaaaggtaacagccaagatcctaatgagaagaatacttttatgaacaatattcctgattttttaagcaattttccaaattttcagcatgatattaatatttcttcatcaaatgaaatcatttcttcccggggcttcattcagacaacagatgtttcttcctcagccaaaaagaaaatattgttattccaattacgacgcatagctgaagactgtcaaattcccctaatggtgtataaccaggcatttatatattttgatcagtatgctgcaatattagaagacactgttagaaatgtattggttgcatcagcagctatgttcattgtttccttattgttaatcccttatccattgtgttccttgtgggtgacttttgctatcggttctgtgattgtaggggtaacgggtttcatggcattctggaaagtcaatcttgattccatatccatgattaatcttgtcatttgtacagggttttctttcgatttttctgcacacatttcctatgcatttgtttctagttctcaaccctcagtaaaccaaaaatcagttgaggcattgtatcttctaggctacccagtgttacaaagtgcaatttcaacaataataggggtgtgtgttttagctgcagcgaaagcatacatcttcagaacattttttaagattatgtttcttgttatgatatttggggcagctcatggcctaatttttattccagtattcttaaccttttttggaaggtttatttgaatatccactaacaagtcaaagaccaattctagaattcctgattgccctattccaatctgatttttttaaatgcactattaagaatagtcaacaaactactgggaggccaaagtgggtggatcacctgaggtcaagaattcgagaccagcctggccaacatggtgaaacctcgacactactgaaaatacaaaaattatccaggcatggtggcgtgcacctataatcccagctacctgggaggctgaggcaggagaatcgcttgaacctgggagatggaggttgcagtgagctggagtgcaccaggcactccagcctgggtgacaagaatgagactccgtctcagaaaaaaaaaaa

SEQ ID NO: 2 - DNA, 2865 bp, Homo sapiens
atgccgtgggtggagcccaagcccaggccggggccggagcagaagcccaagctcaccaaaccggactctgccaccgggccgcagtggtaccaggaatctcaggaatcggagtcggaaggcaagcagccacccccgggacccctggcacccccgaaatcccccgaaccctcaggacccctggcgtcggagcaggatgcacccctgccagagggggacgatgcacccccccggccgtcgatgctggacgatgcaccccgcctgccgctggagctggacgatgcacccctgccggaggaggaaacccccgaacccacggccatctgcaggcaccggcaccgctgtcacaccgactgcctagaggggctgctgtcccgcaccttccagtggctggggtggcaggtgggcgcgcacccctggatcttcctgctggcgcccttgatgctgacagccgcgctgggcaccggcttcctgtacctacccaaggacgaagaggaagacctagaggagcattacacccctgtggggagcccggccaaggcggagcggcgcttcgtgcagggccatttcaccaccaacgactcctaccgcttctccgcctccaggaggagcaccgaagccaatttcgtctcgcttctggtggtctcctacagcgactcactgctggacccagctacctttgcagaagtcagcaaactggacggcgcggtgcaggatctgcgcgtggcgcgggaaaagggaagccagatccagtaccagcaggtgtgcgcgaggtacagggcgctctgcgtgccccccaacccgatcctgtacgcctggcaggtgaacaaaacgctcaacctgagcagcatctccttccccgcctacaaccacggcaggcatcccctctacctgaccggcttcttcggaggatacatcttggggggcagcctaggaatgggccagttactcctgcgggccaaagccatgcggctgctgtactacctgaagaccgaggaccctgagtacgacgtgcagagcaagcagtggctcacccatttgctcgatcaatttaccaacattaagaacatcttggccttgaaaaaaattgaggtagtccactttacatcgctttccagacaactggaatttgaggcaacttctgtgactgtgatccctgtgtttcacctggcatacattctcatcattctgtttgcagtcacatcatgctttaggtttgactgcatacgaaacaaaatgtgtgttgcggcctttggagtgatttctgctttcttggcagtggtgagcggctttggcctgctgttgcacattggggtgccatttgtcatcatagttgccaattcaccatttcttattctaggtgttggggtcgatgacatgtttatcatgatttctgcctggcataagaccaaccttgcaggtgacatacgagagcggatgtccaatgtctattcaaaagcggcagtgtctattacaatcaccaccatcactaacatcctggccttatatacagggattatgagctcttttaggtccgtacaatgtttttgcatctatacaggaacgaccctgttattttgctatttttataacatcacgtgttttggagcatttatggccttggatggtaaaagagaagtagtctgcctatgctggttgaaaaaggctgacccaaaatggccctcatttaaaaagttctgctgtttcccatttggttctgtcccagatgaacatggaactgatatccatccaatgagtttgttttttagagactattttggcccctttctcacaaggagtgagtccaagtattttgtagtctttatatatgttttgtacatcataagcagtatatatgggtgtttccatgtgcaggaaggtttagaccttcgaaatctggcaagtgacgattcctacatcacaccatattttaacgtagaggagaattatttttcagattatggtcccagggttatggttattgttactaaaaaagttgactactgggataaagatgttaggcaaaaactggaaaactgtactaaaatttttgaaaaaaatgtctatgtagataaaaatcttacagagttttggttagatgcatatgtgcaatatttaaaaggtaacagccaagatcctaatgagaagaatacttttatgaacaatattcctgattttttaagcaattttccaaattttcagcatgatattaatatttcttcatcaaatgaaatcatttcttcccggggcttcattcagacaacagatgtttcttcctcagccaaaaagaaaatattgttattccaattacgacgcatagctgaagactgtcaaattcccctaatggtgtataaccaggcatttatatattttgatcagtatgctgcaatattagaagacactgttagaaatgtattggttgcatcagcagctatgttcattgtttccttattgttaatcccttatccattgtgttccttgtgggtgacttttgctatcggttctgtgattgtaggggtaacgggtttcatggcattctggaaagtcaatcttgattccatatccatgattaatcttgtcatttgtacagggttttctttcgatttttctgcacacatttcctatgcatttgtttctagttctcaaccctcagtaaaccaaaaatcagttgaggcattgtatcttctaggctacccagtgttacaaagtgcaatttcaacaataataggggtgtgtgttttagctgcagcgaaagcatacatcttcagaacattttttaagattatgtttcttgttatgatatttggggcagctcatggcctaatttttattccagtattcttaaccttttttggaaggtttatttga

SEQ ID NO: 3 - protein, 954 aa, Homo sapiens
MPWVEPKPRPGPEQKPKLTKPDSATGPQWYQESQESESEGKQPPPGPLAPPKSPEPSGPLASEQDAPLPEGDDAPPRPSMLDDAPRLPLELDDAPLPEEETPEPTAICRHRHRCHTDCLEGLLSRTFQWLGWQVGAHPWIFLLAPLMLTAALGTGFLYLPKDEEEDLEEHYTPVGSPAKAERRFVQGHFTTNDSYRFSASRRSTEANFVSLLVVSYSDSLLDPATFAEVSKLDGAVQDLRVAREKGSQIQYQQVCARYRALCVPPNPILYAWQVNKTLNLSSISFPAYNHGRHPLYLTGFFGGYILGGSLGMGQLLLRAKAMRLLYYLKTEDPEYDVQSKQWLTHLLDQFTNIKNILALKKIEVVHFTSLSRQLEFEATSVTVIPVFHLAYILIILFAVTSCFRFDCIRNKMCVAAFGVISAFLAVVSGFGLLLHIGVPFVIIVANSPFLILGVGVDDMFIMISAWHKTNLAGDIRERMSNVYSKAAVSITITTITNILALYTGIMSSFRSVQCFCIYTGTTLLFCYFYNITCFGAFMALDGKREVVCLCWLKKADPKWPSFKKFCCFPFGSVPDEHGTDIHPMSLFFRDYFGPFLTRSESKYFVVFIYVLYIISSIYGCFHVQEGLDLRNLASDDSYITPYFNVEENYFSDYGPRVMVIVTKKVDYWDKDVRQKLENCTKIFEKNVYVDKNLTEFWLDAYVQYLKGNSQDPNEKNTFMNNIPDFLSNFPNFQHDINISSSNEIISSRGFIQTTDVSSSAKKKILLFQLRRIAEDCQIPLMVYNQAFIYFDQYAAILEDTVRNVLVASAAMFIVSLLLIPYPLCSLWVTFAIGSVIVGVTGFMAFWKVNLDSISMINLVICTGFSFDFSAHISYAFVSSSQPSVNQKSVEALYLLGYPVLQSAISTIIGVCVLAAAKAYIFRTFFKIMFLVMIFGAAHGLIFIPVFLTFFGRFI

SEQ ID NO: 4 - DNA, 3298 bp, Homo sapiens
caggaaaccgtctggtgggatctccgcagctgcttttcacctgctgttcctcctgcgcttcctaagaggaagaatcaatgccgtgggtggagcccaagcccaggccggggccggagcagaagcccaagctcaccaaaccggactctgccaccgggccgcagtggtaccaggaatctcaggaatcggagtcggaaggcaagcagccacccccgggacccctggcacccccgaaatcccccgaaccctcaggacccctggcgtcggagcaggatgcacccctgccagagggggacgatgcacccccccggccgtcgatgctggacgatgcaccccgcctgccgctggagctggacgatgcacccctgccggaggaggaaacccccgaacccacggccatctgcaggcaccggcaccgctgtcacaccgactgcctagaggggctgctgtcccgcaccttccagtggctggggtggcaggtgggcgcgcacccctggatcttcctgctggcgcccttgatgctgacagccgcgctgggcaccggcttcctgtacctacccaaggacgaagaggaagacctagaggagcattacacccctgtggggagcccggccaaggcggagcggcgcttcgtgcagggccatttcaccaccaacgactcctaccgcttctccgcctccaggaggagcaccgaagccaatttcgtctcgcttctggtggtctcctacagcgactcactgctggacccagctacctttgcagaagtcagcaaactggacggcgcggtgcaggatctgcgcgtggcgcgggaaaagggaagccagatccagtaccagcaggtgtgcgcgaggtacagggcgctctgcgtgccccccaacccgatcctgtacgcctggcaggtgaacaaaacgctcaacctgagcagcatctccttccccgcctacaaccacggcaggcatcccctctacctgaccggcttcttcggaggatacatcttggggggcagcctaggaatgggccagttactcctgcgggccaaagccatgcggctgctgtactacctgaagaccgaggaccctgagtacgacgtgcagagcaagcagtggctcacccatttgctcgatcaatttaccaacattaagaacatcttggccttgaaaaaaattgaggtagtccactttacatcgctttccagacaactggaatttgaggcaacttctgtgactgtgatccctgtgtttcacctggcatacattctcatcattctgtttgcagtcacatcatgctttaggtttgactgcatacgaaacaaaatgtgtgttgcggcctttggagtgatttctgctttcttggcagtggtgagcggctttggcctgctgttgcacattggggtgccatttgtcatcatagttgccaattcaccatttcttattctaggtgttggggtcgatgacatgtttatcatgatttctgcctggcataagaccaaccttgcagatgacatacgagagcggatgtccaatgtctattcaaaagcggcagtgtctattacaatcaccaccatcactaacatcctggccttatatacagggattatgagctcttttaggtctgtacaatgtttttgcatctatacaggaatgaccctgttattttgctatttttataacatcacgtgttttggagcatttatggccttggatggtaaaagagaagtagtctgcctatgctggttgaaaaaggctgacccaaaatggccctcatttaaaaagttctgctgtttcccatttggttctgtcccagatgaacatggaactgatatccatccaataagtttgttttttagagactattttggcccctttctcacaaggagtgagtccaagtattttgtagtctttatatatgttttgtacatcataagcagtatatatgggtgtttccatgtgcaggaaggtttagaccttcgaaatctggcaagtgacgattcctacatcacaccatattttaacgtagaggagaattatttttcagattatggtcccagggttatggttattgttactaaaaaagttgactactgggataaagatgttaggcaaaaactggaaaactgtactaaaatttttgaaaaaaatgtctatgtagataaaaatcttacagagttttggttagatgcatatgtgcaatatttaaaaggtaacagccaagatcctaatgagaagaatacttttatgaacaatattcctgattttttaagcaattttccaaattttcagcatgatattaatatttcttcatcaaatgaaatcatttcttcccggggcttcattcagacaacagatgtttcttcctcagccaaaaagaaaatattgttattctaattacgacgcatagctgaagactgtcaaattcccctaatggtgtataaccaggcatttatatattttgatcagtatgctgcaatattagaagacactgttagaaatgtattggttgcatcagcagctatgttcattgtttccttattgttaatcccttatccattgtgttccttgtgggtgacttttgctattggttctgtgattgtaggggtaacgggtttcatggcattctggaaagtcaatcttgattccatatccatgattaatcttgtcatttgtatagggttttctttcgatttttctgtacacatttcctatgcatttgtttctagttctcaaccctcagtaaaccaaaaatcagttgaggcattgtatcttctaggctacccagtgttacaaagtgcaatttcaacaataataggggtgtgtgttttagctgcagcgaaagcatacatcttcagaacattttttaagattatgtttcttgttatgatatttggggcagctcatggcctaatttttattccagtattcttaaccttttttggaaggtttatttgaatatccactaacaagtcaaagaccaattctagaattcctgattgccctattccaatctgatttttttaaatgcactattaagaatagtcaacaaactactgggaggccaaggtgggtggatcacctgaggtcaagaattcgagaccagcctggccaacatggtgaaacctcgacactactgaaaatacaaaaattatccaggcatggtggcgtgcacctataatcccagctacctgggaggctgaggcaggagaatcgcttgaacctgggagatggaggttgcagtgagctggagtgcaccaggcactccagcctgggtgacaagaatgagactccgtctcagaaaaaaaaaaaaa

SEQ ID NO: 5 - DNA, 2304 bp, Homo sapiens
atgccgtgggtggagcccaagcccaggccggggccggagcagaagcccaagctcaccaaaccggactctgccaccgggccgcagtggtaccaggaatctcaggaatcggagtcggaaggcaagcagccacccccgggacccctggcacccccgaaatcccccgaaccctcaggacccctggcgtcggagcaggatgcacccctgccagagggggacgatgcacccccccggccgtcgatgctggacgatgcaccccgcctgccgctggagctggacgatgcacccctgccggaggaggaaacccccgaacccacggccatctgcaggcaccggcaccgctgtcacaccgactgcctagaggggctgctgtcccgcaccttccagtggctggggtggcaggtgggcgcgcacccctggatcttcctgctggcgcccttgatgctgacagccgcgctgggcaccggcttcctgtacctacccaaggacgaagaggaagacctagaggagcattacacccctgtggggagcccggccaaggcggagcggcgcttcgtgcagggccatttcaccaccaacgactcctaccgcttctccgcctccaggaggagcaccgaagccaatttcgtctcgcttctggtggtctcctacagcgactcactgctggacccagctacctttgcagaagtcagcaaactggacggcgcggtgcaggatctgcgcgtggcgcgggaaaagggaagccagatccagtaccagcaggtgtgcgcgaggtacagggcgctctgcgtgccccccaacccgatcctgtacgcctggcaggtgaacaaaacgctcaacctgagcagcatctccttccccgcctacaaccacggcaggcatcccctctacctgaccggcttcttcggaggatacatcttggggggcagcctaggaatgggccagttactcctgcgggccaaagccatgcggctgctgtactacctgaagaccgaggaccctgagtacgacgtgcagagcaagcagtggctcacccatttgctcgatcaatttaccaacattaagaacatcttggccttgaaaaaaattgaggtagtccactttacatcgctttccagacaactggaatttgaggcaacttctgtgactgtgatccctgtgtttcacctggcatacattctcatcattctgtttgcagtcacatcatgctttaggtttgactgcatacgaaacaaaatgtgtgttgcggcctttggagtgatttctgctttcttggcagtggtgagcggctttggcctgctgttgcacattggggtgccatttgtcatcatagttgccaattcaccatttcttattctaggtgttggggtcgatgacatgtttatcatgatttctgcctggcataagaccaaccttgcagatgacatacgagagcggatgtccaatgtctattcaaaagcggcagtgtctattacaatcaccaccatcactaacatcctggccttatatacagggattatgagctcttttaggtctgtacaatgtttttgcatctatacaggaatgaccctgttattttgctatttttataacatcacgtgttttggagcatttatggccttggatggtaaaagagaagtagtctgcctatgctggttgaaaaaggctgacccaaaatggccctcatttaaaaagttctgctgtttcccatttggttctgtcccagatgaacatggaactgatatccatccaataagtttgttttttagagactattttggcccctttctcacaaggagtgagtccaagtattttgtagtctttatatatgttttgtacatcataagcagtatatatgggtgtttccatgtgcaggaaggtttagaccttcgaaatctggcaagtgacgattcctacatcacaccatattttaacgtagaggagaattatttttcagattatggtcccagggttatggttattgttactaaaaaagttgactactgggataaagatgttaggcaaaaactggaaaactgtactaaaatttttgaaaaaaatgtctatgtagataaaaatcttacagagttttggttagatgcatatgtgcaatatttaaaaggtaacagccaagatcctaatgagaagaatacttttatgaacaatattcctgattttttaagcaattttccaaattttcagcatgatattaatatttcttcatcaaatgaaatcatttcttcccggggcttcattcagacaacagatgtttcttcctcagccaaaaagaaaatattgttattctaa

SEQ ID NO: 6 - protein, 767 aa, Homo sapiens
MPWVEPKPRPGPEQKPKLTKPDSATGPQWYQESQESESEGKQPPPGPLAPPKSPEPSGPLASEQDAPLPEGDDAPPRPSMLDDAPRLPLELDDAPLPEEETPEPTAICRHRHRCHTDCLEGLLSRTFQWLGWQVGAHPWIFLLAPLMLTAALGTGFLYLPKDEEEDLEEHYTPVGSPAKAERRFVQGHFTTNDSYRFSASRRSTEANFVSLLVVSYSDSLLDPATFAEVSKLDGAVQDLRVAREKGSQIQYQQVCARYRALCVPPNPILYAWQVNKTLNLSSISFPAYNHGRHPLYLTGFFGGYILGGSLGMGQLLLRAKAMRLLYYLKTEDPEYDVQSKQWLTHLLDQFTNIKNILALKKIEVVHFTSLSRQLEFEATSVTVIPVFHLAYILIILFAVTSCFRFDCIRNKMCVAAFGVISAFLAVVSGFGLLLHIGVPFVIIVANSPFLILGVGVDDMFIMISAWHKTNLADDIRERMSNVYSKAAVSITITTITNILALYTGIMSSFRSVQCFCIYTGMTLLFCYFYNITCFGAFMALDGKREVVCLCWLKKADPKWPSFKKFCCFPFGSVPDEHGTDIHPISLFFRDYFGPFLTRSESKYFVVFIYVLYIISSIYGCFHVQEGLDLRNLASDDSYITPYFNVEENYFSDYGPRVMVIVTKKVDYWDKDVRQKLENCTKIFEKNVYVDKNLTEFWLDAYVQYLKGNSQDPNEKNTFMNNIPDFLSNFPNFQHDINISSSNEIISSRGFIQTTDVSSSAKKKILLF

SEQ ID NO: 7 - DNA, 2021 bp, Homo sapiens
caggaaaccgtctggtgggatctccgcagctgcttttcacctgctgttcctcctgcgcttcctaagaggaagaatcaatgccgtgggtggagcccaagcccaggccggggccggagcagaagcccaagctcaccaaaccggactctgccaccgggccgcagtggtaccaggaatctcaggaatcggagtcggaaggcaagcagccacccccgggacccctggcacccccgaaatcccccgaaccctcaggacccctggcgtcggagcaggatgcacccctgccagagggggacgatgcacccccccggccgtcgatgctggacgatgcaccccgcctgccgctggagctggacgatgcacccctgccggaggaggaaacccccgaacccacggccatctgcaggcaccggcaccgctgtcacaccgactgcctagaggggctgctgtcccgcaccttccagtggctggggtggcaggtgggcgcgcacccctggatcttcctgctggcgcccttgatgctgacagccgcgctgggcaccggcttcctgtacctacccaaggacgaagaggaagacctagaggagcattacacccctgtggggagcccggccaaggcggagcggcgcttcgtgcagggccatttcaccaccaacgactcctaccgcttctccgcctccaggaggagcaccgaagccaatttcgtctcgcttctggtggtctcctacagcgactcactgctggacccagctacctttgcagaagtcagcaaactggacggcgcggtgcaggatctgcgcgtggcgcgggaaaagggaagccagatccagtaccagcaggtgtgcgcgaggtacagggcgctctgcgtgccccccaacccgatcctgtacgcctggcaggtgaacaaaacgctcaacctgagcagcatctccttccccgcctacaaccacggcaggcatcccctctacctgaccggcttcttcggaggatacatcttggggggcagcctaggaatgggccagttactcctgcgggccaaagccatgcggctgctgtactacctgaagaccgaggaccctgagtacgacgtgcagagcaagcagtggctcacccatttgctcgatcaatttaccaacattaagaacatcttggccttgaaaaaaattgaggtagtccactttacatcgctttccagacaactggaatttgaggcaacttctgtgactgtgatccctgtgtttcacctggcatacattctcatcattctgtttgcagtcacatcatgctttaggtttgactgcatacgaaacaaaatgtgtgttgcggcctttggagtgatttctgctttcttggcagtggtgagcggctttggcctgctgttgcacattggggtgccatttgtcatcatagttgccaattcaccatttcttattctaggtgttggggtcgatgacatgtttatcatgatttctgcctggcataagaccaaccttgcaggtgacatacgagagcggatgtccaatgtctattcaaaagcggcagtgtctattacaatcaccaccatcactaacatcctggccttatatacagggattatgagctcttttaggtccgtacaatgtttttgcatctatacaggaacgaccctgttattttgctatttttataacatcacgtgttttggagcatttatggccttggatggtaaaagagaagtagtctgcctatgctggttgaaaaaggctgacccaaaatggccctcatttaaaaagttctgctgtttcccatttggttctgtcccagatgaacatggaactgatatccatccaatgagtttgttttttagagactattttggcccctttctcacaaggagtgagtccaagtattttgtagtctttatatatgttttgtacatcataagcagtatatatgggtgtttccatgtgcaggaaggtttagaccttcgaaatctggcaagtgacgattcctacatcacaccatattttaacgtagaggagaat

SEQ ID NO: 8 - DNA, 77 bp, Homo sapiens
caggaaaccgtctggtgggatctccgcagctgcttttcacctgctgttcctcctgcgcttcctaagaggaagaatca

SEQ ID NO: 9 - DNA, 1944 bp, Homo sapiens
atgccgtgggtggagcccaagcccaggccggggccggagcagaagcccaagctcaccaaaccggactctgccaccgggccgcagtggtaccaggaatctcaggaatcggagtcggaaggcaagcagccacccccgggacccctggcacccccgaaatcccccgaaccctcaggacccctggcgtcggagcaggatgcacccctgccagagggggacgatgcacccccccggccgtcgatgctggacgatgcaccccgcctgccgctggagctggacgatgcacccctgccggaggaggaaacccccgaacccacggccatctgcaggcaccggcaccgctgtcacaccgactgcctagaggggctgctgtcccgcaccttccagtggctggggtggcaggtgggcgcgcacccctggatcttcctgctggcgcccttgatgctgacagccgcgctgggcaccggcttcctgtacctacccaaggacgaagaggaagacctagaggagcattacacccctgtggggagcccggccaaggcggagcggcgcttcgtgcagggccatttcaccaccaacgactcctaccgcttctccgcctccaggaggagcaccgaagccaatttcgtctcgcttctggtggtctcctacagcgactcactgctggacccagctacctttgcagaagtcagcaaactggacggcgcggtgcaggatctgcgcgtggcgcgggaaaagggaagccagatccagtaccagcaggtgtgcgcgaggtacagggcgctctgcgtgccccccaacccgatcctgtacgcctggcaggtgaacaaaacgctcaacctgagcagcatctccttccccgcctacaaccacggcaggcatcccctctacctgaccggcttcttcggaggatacatcttggggggcagcctaggaatgggccagttactcctgcgggccaaagccatgcggctgctgtactacctgaagaccgaggaccctgagtacgacgtgcagagcaagcagtggctcacccatttgctcgatcaatttaccaacattaagaacatcttggccttgaaaaaaattgaggtagtccactttacatcgctttccagacaactggaatttgaggcaacttctgtgactgtgatccctgtgtttcacctggcatacattctcatcattctgtttgcagtcacatcatgctttaggtttgactgcatacgaaacaaaatgtgtgttgcggcctttggagtgatttctgctttcttggcagtggtgagcggctttggcctgctgttgcacattggggtgccatttgtcatcatagttgccaattcaccatttcttattctaggtgttggggtcgatgacatgtttatcatgatttctgcctggcataagaccaaccttgcaggtgacatacgagagcggatgtccaatgtctattcaaaagcggcagtgtctattacaatcaccaccatcactaacatcctggccttatatacagggattatgagctcttttaggtccgtacaatgtttttgcatctatacaggaacgaccctgttattttgctatttttataacatcacgtgttttggagcatttatggccttggatggtaaaagagaagtagtctgcctatgctggttgaaaaaggctgacccaaaatggccctcatttaaaaagttctgctgtttcccatttggttctgtcccagatgaacatggaactgatatccatccaatgagtttgttttttagagactattttggcccctttctcacaaggagtgagtccaagtattttgtagtctttatatatgttttgtacatcataagcagtatatatgggtgtttccatgtgcaggaaggtttagaccttcgaaatctggcaagtgacgattcctacatcacaccatattttaacgtagaggagaat

SEQ ID NO: 10 - protein, 648 aa, Homo sapiens
MPWVEPKPRPGPEQKPKLTKPDSATGPQWYQESQESESEGKQPPPGPLAPPKSPEPSGPLASEQDAPLPEGDDAPPRPSMLDDAPRLPLELDDAPLPEEETPEPTAICRHRHRCHTDCLEGLLSRTFQWLGWQVGAHPWIFLLAPLMLTAALGTGFLYLPKDEEEDLEEHYTPVGSPAKAERRFVQGHFTTNDSYRFSASRRSTEANFVSLLVVSYSDSLLDPATFAEVSKLDGAVQDLRVAREKGSQIQYQQVCARYRALCVPPNPILYAWQVNKTLNLSSISFPAYNHGRHPLYLTGFFGGYILGGSLGMGQLLLRAKAMRLLYYLKTEDPEYDVQSKQWLTHLLDQFTNIKNILALKKIEVVHFTSLSRQLEFEATSVTVIPVFHLAYILIILFAVTSCFRFDCIRNKMCVAAFGVISAFLAVVSGFGLLLHIGVPFVIIVANSPFLILGVGVDDMFIMISAWHKTNLAGDIRERMSNVYSKAAVSITITTITNILALYTGIMSSFRSVQCFCIYTGTTLLFCYFYNITCFGAFMALDGKREVVCLCWLKKADPKWPSFKKFCCFPFGSVPDEHGTDIHPMSLFFRDYFGPFLTRSESKYFVVFIYVLYIISSIYGCFHVQEGLDLRNLASDDSYITPYFNVEEN

SEQ ID NO: 11 - DNA, 405 bp, Homo sapiens
tccatgattaatcttgtcatttgtacagggttttctttcgatttttctgcacacatttcctatgcatttgtttctagttctcaaccctcagtaaaccaaaaatcagttgaggcattgtatcttctaggctacccagtgttacaaagtgcaatttcaacaataataggggtgtgtgttttagctgcagcgaaagcatacatcttcagaacattttttaagattatgtttcttgttatgatatttggggcagctcatggcctaatttttattccagtattcttaaccttttttggaaggtttatttgaatatccactaacaagtcaaagaccaattctagaattcctgattgccctattccaatctgatttttttaaatgcactattaagaatagtcaacaaactac

SEQ ID NO: 12 - DNA, 306 bp, Homo sapiens
tccatgattaatcttgtcatttgtacagggttttctttcgatttttctgcacacatttcctatgcatttgtttctagttctcaaccctcagtaaaccaaaaatcagttgaggcattgtatcttctaggctacccagtgttacaaagtgcaatttcaacaataataggggtgtgtgttttagctgcagcgaaagcatacatcttcagaacattttttaagattatgtttcttgttatgatatttggggcagctcatggcctaatttttattccagtattcttaaccttttttggaaggtttatttga

SEQ ID NO: 13 - DNA, 99 bp, Homo sapiens
atatccactaacaagtcaaagaccaattctagaattcctgattgccctattccaatctgatttttttaaatgcactattaagaatagtcaacaaactac

SEQ ID NO: 14 - protein, 101 aa, Homo sapiens
SMINLVICTGFSFDFSAHISYAFVSSSQPSVNQKSVEALYLLGYPVLQSAISTIIGVCVLAAAKAYIFRTFFKIMFLVMIFGAAHGLIFIPVFLTFFGRFI

SEQ ID NO: 15 - DNA, 1166 bp, Homo sapiens
caggaaaccgtctggtgggatctccgcagctgcttttcacctgctgttcctcctgcgcttcctaagaggaagaatcaatgccgtgggtggagcccaagcccaggccggggccggagcagaagcccaagctcaccaaaccggactctgccaccgggccgcagtggtaccaggaatctcaggaatcggagtcggaaggcaagcagccacccccgggacccctggcacccccgaaatcccccgaaccctcaggacccctggcgtcggagcaggatgcacccctgccagagggggacgatgcacccccccggccgtcgatgctggacgatgcaccccgcctgccgctggagctggacgatgcacccctgccggaggaggaaacccccgaacccacggccatctgcaggcaccggcaccgctgtcacaccgactgcctagaggggctgctgtcccgcaccttccagtggctggggtggcaggtgggcgcgcacccctggatcttcctgctggcgcccttgatgctgacagccgcgctgggcaccggcttcctgtacctacccaaggacgaagaggaagacctagaggagcattacacccctgtggggagcccggccaaggcggagcggcgcttcgtgcagggccatttcaccaccaacgactcctaccgcttctccgcctccaggaggagcaccgaagccaatttcgtctcgcttctggtggtctcctacagcgactcactgctggacccagctacctttgcagaagtcagcaaactggacggcgcggtgcaggatctgcgcgtggcgcgggaaaagggaagccagatccagtaccagcaggtgtgcgcgaggtacagggcgctctgcgtgccccccaacccgatcctgtacgcctggcaggtgaacaaaacgctcaacctgagcagcatctccttccccgcctacaaccacggcaggcatcccctctacctgaccggcttcttcggaggatacatcttggggggcagcctaggaatgggccagttactcctgcgggccaaagccatgcggctgctgtactacctgaagaccgaggaccctgagtacgacgtgcagagcaagcagtggctcacccatttgctcgatcaatttaccaacattaagaacatcttggccttgaaaaaaattgag

SEQ ID NO: 16 - DNA, 122 bp, Homo sapiens
gtagtccactttacatcgctttccagacaactggaatttgaggcaacttctgtgactgtgatccctgtgtttcacctggcatacattctcatcattctgtttgcagtcacatcatgctttag

SEQ ID NO: 17 - DNA, 146 bp, Homo sapiens
gtttgactgcatacgaaacaaaatgtgtgttgcggcctttggagtgatttctgctttcttggcagtggtgagcggctttggcctgctgttgcacattggggtgccatttgtcatcatagttgccaattcaccatttcttattctag

SEQ ID NO: 18 - DNA, 1862 bp, Homo sapiens
gtgttggggtcgatgacatgtttatcatgatttctgcctggcataagaccaaccttgcaggtgacatacgagagcggatgtccaatgtctattcaaaagcggcagtgtctattacaatcaccaccatcactaacatcctggccttatatacagggattatgagctcttttaggtccgtacaatgtttttgcatctatacaggaacgaccctgttattttgctatttttataacatcacgtgttttggagcatttatggccttggatggtaaaagagaagtagtctgcctatgctggttgaaaaaggctgacccaaaatggccctcatttaaaaagttctgctgtttcccatttggttctgtcccagatgaacatggaactgatatccatccaatgagtttgttttttagagactattttggcccctttctcacaaggagtgagtccaagtattttgtagtctttatatatgttttgtacatcataagcagtatatatgggtgtttccatgtgcaggaaggtttagaccttcgaaatctggcaagtgacgattcctacatcacaccatattttaacgtagaggagaattatttttcagattatggtcccagggttatggttattgttactaaaaaagttgactactgggataaagatgttaggcaaaaactggaaaactgtactaaaatttttgaaaaaaatgtctatgtagataaaaatcttacagagttttggttagatgcatatgtgcaatatttaaaaggtaacagccaagatcctaatgagaagaatacttttatgaacaatattcctgattttttaagcaattttccaaattttcagcatgatattaatatttcttcatcaaatgaaatcatttcttcccggggcttcattcagacaacagatgtttcttcctcagccaaaaagaaaatattgttattccaattacgacgcatagctgaagactgtcaaattcccctaatggtgtataaccaggcatttatatattttgatcagtatgctgcaatattagaagacactgttagaaatgtattggttgcatcagcagctatgttcattgtttccttattgttaatcccttatccattgtgttccttgtgggtgacttttgctatcggttctgtgattgtaggggtaacgggtttcatggcattctggaaagtcaatcttgattccatatccatgattaatcttgtcatttgtacagggttttctttcgatttttctgcacacatttcctatgcatttgtttctagttctcaaccctcagtaaaccaaaaatcagttgaggcattgtatcttctaggctacccagtgttacaaagtgcaatttcaacaataataggggtgtgtgttttagctgcagcgaaagcatacatcttcagaacattttttaagattatgtttcttgttatgatatttggggcagctcatggcctaatttttattccagtattcttaaccttttttggaaggtttatttgaatatccactaacaagtcaaagaccaattctagaattcctgattgccctattccaatctgatttttttaaatgcactattaagaatagtcaacaaactactgggaggccaaagtgggtggatcacctgaggtcaagaattcgagaccagcctggccaacatggtgaaacctcgacactactgaaaatacaaaaattatccaggcatggtggcgtgcacctataatcccagctacctgggaggctgaggcaggagaatcgcttgaacctgggagatggaggttgcagtgagctggagtgcaccaggcactccagcctgggtgacaagaatgagactccgtctcagaaaaaaaaaaa

SEQ ID NO: 19 - DNA, 500 bp, Homo sapiens
cctgccgctggagctggacgatgcacccctgccggaggaggaaacccccgaacccacggccatctgcaggcaccggcaccgctgtcacaccgactgcctagaggggctgctgtcccgcaccttccagtggctggggtggcaggtgggcgcgcacccctggatcttcctgctggcgcccttgatgctgacagccgcgctgggcaccggcttcctgtacctacccaaggacgaagaggaagacctagaggagcattacacccctgtggggagcccggccaaggcggagcggcgcttcgtgcagggccatttcaccaccaacgactcctaccgcttctccgcctccaggaggagcaccgaagccaatttcgtctcgcttctggtggtctcctacagcgactcactgctggacccagctacctttgcagaagtcagcaaactggacggcgcggtgcaggatctgcgcgtggcgcgggaaaagggaagccagatccagtaccagc

SEQ ID NO: 20 - DNA, 500 bp, Homo sapiens
tgtgtggaaagaagcaaatctacattattttctctattctgaagtcataatccatgtatttttatcttttgctgaattttaacatacatattgtttcatcactaagataaagtgtttcaatagtttttgtaactcacacacaaatattgtaattaaaagctatttatctgagtatatttttgtggcaggtagtccactttacatcgctttccagacaactggaatttgaggcaacttctgtgactgtgatccctgtgtttcacctggcatacattctcatcattctgtttgcagtcacatcatgctttaggtaaaaagctttgattagtttttaaatctcttactttatgaaaaatactttattgtggtaaaatataataatatatatgacataacatatgatgttatagccactcttaagtgtaaaattcggtggcattaattacatccacattggcatgcaaccatcacaatgatctgttttcaaatattttgcatca

SEQ ID NO: 21 - DNA, 500 bp, Homo sapiens
ttccttttttttttttcagttgttctgagatagtccctgggaattaaaggtctccagcagatatgtgtggaaattactgtcttagagatttatgactaggtgtccaagtcaagaatgttatccattgatgaaagctaccaccacaaattccatgatttttccctccaaatttacaggtttgactgcatacgaaacaaaatgtgtgttgcggcctttggagtgatttctgctttcttggcagtggtgagcggctttggcctgctgttgcacattggggtgccatttgtcatcatagttgccaattcaccatttcttattctaggtgagtaaaacaaaacgggaggctgcacaccgtgtatgtggtggggtaggggatatatataagggaaagaattgtattaaggtggctctacagttcaaaaatgaggtgccaggaaacagggaaatgaaattgaactggatatctctagaggtggaaagatcgagtatcctaatggaaa

SEQ ID NO: 22 - DNA, 500 bp, Homo sapiens
tacatcacaccatattttaacgtagaggagaattatttttcagattatggtcccagggttatggttattgttactaaaaaagttgactactgggataaagatgttaggcaaaaactggaaaactgtactaaaatttttgaaaaaaatgtctatgtagataaaaatcttacagagttttggttagatgcatatgtgcaatatttaaaaggtaacagccaagatcctaatgagaagaatacttttatgaacaatattcctgattttttaagcaattttccaaattttcagcatgatattaatatttcttcatcaaatgaaatcatttcttcccggggcttcattcagacaacagatgtttcttcctcagccaaaaagaaaatattgttattccaattacgacgcatagctgaagactgtcaaattcccctaatggtgtataaccaggcatttatatattttgatcagtatgctgcaatattagaagacactgttagaaatgt

SEQ ID NO: 23 - DNA, 1000 bp, Homo sapiens
cattgtaggataggctgtggcaaattcatatattgcttatgagggtataaatcaatacaacttctttggattttaatttctcaatagctctaaaaatttaaaagaacctatcctttggcctagtgaatccactctaaagaattatctctcacagatatggttgctgtgtacaggttaaaatatgatatttatttactgagcactgtttataaaagcaaatgactaaacaatgtatgggtccatcagtaaaattctggctaaattatgtttcatccatacattggaaaagtatagagcagttcaaaaaaataagataaatccatatgcactgacatgttcaaatcttctgccactgtagatgaaaaatgtgatctacataacatgaatagtgaagtagtatttatgaaaaaggtatatttgctatatctttgatatgcatgtatatgcatagaaagggtttgcaaggatgtagacccactttttaacacttcttttaagaggaatgggagtgaaagattttgatttttttttccccacttttcattctatgcatttacttctttttactaggagaatgtatgtacatgttacacttgtggacagaaaataaaaataataactaagtcaagtgtgtcagattcataaaagtcttacttgaaactgttactgggtgaatgccaagaaaggtaaaatctgtcactcaggacacgtggaatttctgtgccatttgtgtgcatggaagaaacacccacattctcccaataaattgcgagtccataggataggcacgcatttgatggccttgaagaagcgttccttgtatgtgcagaacccctgagaaaccaggcacgccacaaacacatttcagattagttgggcgacggggcaaaccacgtgctcccaacgcagcctccgcttccggagcgcggctggagggcaaactcccctagaatttctccaggaaaccgttgggtggggccaggagagcgttgggtggggc

SEQ ID NO: 24 - DNA, 17 bp, Homo sapiens
caggaaaccgtctggtg

SEQ ID NO: 25 - DNA, 17 bp, Homo sapiens
aggaaaccgtctggtgg

SEQ ID NO: 26 - DNA, 17 bp, Homo sapiens
ggaaaccgtctggtggg

SEQ ID NO: 27 - DNA, 17 bp, Homo sapiens
gaaaccgtctggtggga

SEQ ID NO: 28 - DNA, 17 bp, Homo sapiens
aaaccgtctggtgggat

SEQ ID NO: 29 - DNA, 17 bp, Homo sapiens
aaccgtctggtgggatc

SEQ ID NO: 30 - DNA, 17 bp, Homo sapiens
accgtctggtgggatct

SEQ ID NO: 31 - DNA, 17 bp, Homo sapiens
ccgtctggtgggatctc

SEQ ID NO: 32 - DNA, 17 bp, Homo sapiens
cgtctggtgggatctcc

SEQ ID NO: 33 - DNA, 17 bp, Homo sapiens
gtctggtgggatctccg

SEQ ID NO: 34 - DNA, 17 bp, Homo sapiens
tctggtgggatctccgc

SEQ ID NO: 35 - DNA, 17 bp, Homo sapiens
ctggtgggatctccgca

SEQ ID NO: 36 - DNA, 17 bp, Homo sapiens
tggtgggatctccgcag

SEQ ID NO: 37 - DNA, 17 bp, Homo sapiens
ggtgggatctccgcagc

SEQ ID NO: 38 - DNA, 17 bp, Homo sapiens
gtgggatctccgcagct

SEQ ID NO: 39 - DNA, 17 bp, Homo sapiens
tgggatctccgcagctg

SEQ ID NO: 40 - DNA, 17 bp, Homo sapiens
gggatctccgcagctgc

SEQ ID NO: 41 - DNA, 17 bp, Homo sapiens
ggatctccgcagctgct

SEQ ID NO: 42 - DNA, 17 bp, Homo sapiens
gatctccgcagctgctt

SEQ ID NO: 43 - DNA, 17 bp, Homo sapiens
atctccgcagctgcttt

SEQ ID NO: 44 - DNA, 17 bp, Homo sapiens
tctccgcagctgctttt

SEQ ID NO: 45 - DNA, 17 bp, Homo sapiens
ctccgcagctgcttttc

SEQ ID NO: 46 - DNA, 17 bp, Homo sapiens
tccgcagctgcttttca

SEQ ID NO: 47 - DNA, 17 bp, Homo sapiens
ccgcagctgcttttcac

SEQ ID NO: 48 - DNA, 17 bp, Homo sapiens
cgcagctgcttttcacc

SEQ ID NO: 49 - DNA, 17 bp, Homo sapiens
gcagctgcttttcacct

SEQ ID NO: 50 - DNA, 17 bp, Homo sapiens
cagctgcttttcacctg

SEQ ID NO: 51 - DNA, 17 bp, Homo sapiens
agctgcttttcacctgc

SEQ ID NO: 52 - DNA, 17 bp, Homo sapiens
gctgcttttcacctgct

SEQ ID NO: 53 - DNA, 17 bp, Homo sapiens
ctgcttttcacctgctg

SEQ ID NO: 54 - DNA, 17 bp, Homo sapiens
tgcttttcacctgctgt

SEQ ID NO: 55 - DNA, 17 bp, Homo sapiens
gcttttcacctgctgtt

SEQ ID NO: 56 - DNA, 17 bp, Homo sapiens
cttttcacctgctgttc

SEQ ID NO: 57 - DNA, 17 bp, Homo sapiens
ttttcacctgctgttcc

SEQ ID NO: 58 - DNA, 17 bp, Homo sapiens
tttcacctgctgttcct

SEQ ID NO: 59 - DNA, 17 bp, Homo sapiens
ttcacctgctgttcctc

SEQ ID NO: 60 - DNA, 17 bp, Homo sapiens
tcacctgctgttcctcc

SEQ ID NO: 61 - DNA, 17 bp, Homo sapiens
cacctgctgttcctcct

SEQ ID NO: 62 - DNA, 17 bp, Homo sapiens
acctgctgttcctcctg

SEQ ID NO: 63 - DNA, 17 bp, Homo sapiens
cctgctgttcctcctgc

SEQ ID NO: 64 - DNA, 17 bp, Homo sapiens
ctgctgttcctcctgcg

SEQ ID NO: 65 - DNA, 17 bp, Homo sapiens
tgctgttcctcctgcgc

SEQ ID NO: 66 - DNA, 17 bp, Homo sapiens
gctgttcctcctgcgct

SEQ ID NO: 67 - DNA, 17 bp, Homo sapiens
ctgttcctcctgcgctt

SEQ ID NO: 68 - DNA, 17 bp, Homo sapiens
tgttcctcctgcgcttc

SEQ ID NO: 69 - DNA, 17 bp, Homo sapiens
gttcctcctgcgcttcc

SEQ ID NO: 70 - DNA, 17 bp, Homo sapiens
ttcctcctgcgcttcct

SEQ ID NO: 71 - DNA, 17 bp, Homo sapiens
tcctcctgcgcttccta

SEQ ID NO: 72 - DNA, 17 bp, Homo sapiens
cctcctgcgcttcctaa

SEQ ID NO: 73 - DNA, 17 bp, Homo sapiens
ctcctgcgcttcctaag

SEQ ID NO: 74 - DNA, 17 bp, Homo sapiens
tcctgcgcttcctaaga

SEQ ID NO: 75 - DNA, 17 bp, Homo sapiens
cctgcgcttcctaagag

SEQ ID NO: 76 - DNA, 17 bp, Homo sapiens
ctgcgcttcctaagagg

SEQ ID NO: 77 - DNA, 17 bp, Homo sapiens
tgcgcttcctaagagga

SEQ ID NO: 78 - DNA, 17 bp, Homo sapiens
gcgcttcctaagaggaa

SEQ ID NO: 79 - DNA, 17 bp, Homo sapiens
cgcttcctaagaggaag

SEQ ID NO: 80 - DNA, 17 bp, Homo sapiens
gcttcctaagaggaaga

SEQ ID NO: 81 - DNA, 17 bp, Homo sapiens
cttcctaagaggaagaa

SEQ ID NO: 82 - DNA, 17 bp, Homo sapiens
ttcctaagaggaagaat

SEQ ID NO: 83 - DNA, 17 bp, Homo sapiens
tcctaagaggaagaatc

SEQ ID NO: 84 - DNA, 17 bp, Homo sapiens
cctaagaggaagaatca

SEQ ID NO: 85 - DNA, 17 bp, Homo sapiens
ctaagaggaagaatcaa

SEQ ID NO: 86 - DNA, 17 bp, Homo sapiens
taagaggaagaatcaat

SEQ ID NO: 87 - DNA, 17 bp, Homo sapiens
aagaggaagaatcaatg

SEQ ID NO: 88 - DNA, 17 bp, Homo sapiens
agaggaagaatcaatgc

SEQ ID NO: 89 - DNA, 17 bp, Homo sapiens
gaggaagaatcaatgcc

SEQ ID NO: 90 - DNA, 17 bp, Homo sapiens
aggaagaatcaatgccg

SEQ ID NO: 91 - DNA, 17 bp, Homo sapiens
ggaagaatcaatgccgt

SEQ ID NO: 92 - DNA, 17 bp, Homo sapiens
gaagaatcaatgccgtg

SEQ ID NO: 93 - DNA, 17 bp, Homo sapiens
aagaatcaatgccgtgg

SEQ ID NO: 94 - DNA, 17 bp, Homo sapiens
agaatcaatgccgtggg

SEQ ID NO: 95 - DNA, 17 bp, Homo sapiens
gaatcaatgccgtgggt

SEQ ID NO: 96 - DNA, 17 bp, Homo sapiens
aatcaatgccgtgggtg

SEQ ID NO: 97 - DNA, 17 bp, Homo sapiens
atcaatgccgtgggtgg

SEQ ID NO: 98 - DNA, 17 bp, Homo sapiens
tcaatgccgtgggtgga

SEQ ID NO: 99 - DNA, 17 bp, Homo sapiens
caatgccgtgggtggag

SEQ ID NO: 100 - DNA, 17 bp, Homo sapiens
aatgccgtgggtggagc

SEQ ID NO: 101 - DNA, 17 bp, Homo sapiens
atgccgtgggtggagcc

SEQ ID NO: 102 - DNA, 17 bp, Homo sapiens
tgccgtgggtggagccc

SEQ ID NO: 103 - DNA, 17 bp, Homo sapiens
gccgtgggtggagccca

SEQ ID NO: 104 - DNA, 17 bp, Homo sapiens
ccgtgggtggagcccaa

SEQ ID NO: 105 - DNA, 17 bp, Homo sapiens
cgtgggtggagcccaag

SEQ ID NO: 106 - DNA, 17 bp, Homo sapiens
gtgggtggagcccaagc

SEQ ID NO: 107 - DNA, 17 bp, Homo sapiens
tgggtggagcccaagcc

SEQ ID NO: 108 - DNA, 17 bp, Homo sapiens
gggtggagcccaagccc

SEQ ID NO: 109 - DNA, 17 bp, Homo sapiens
ggtggagcccaagccca

SEQ ID NO: 110 - DNA, 17 bp, Homo sapiens
gtggagcccaagcccag

SEQ ID NO: 111 - DNA, 17 bp, Homo sapiens
tggagcccaagcccagg

SEQ ID NO: 112 - DNA, 17 bp, Homo sapiens
ggagcccaagcccaggc

SEQ ID NO: 113 - DNA, 17 bp, Homo sapiens
gagcccaagcccaggcc

SEQ ID NO: 114 - DNA, 17 bp, Homo sapiens
agcccaagcccaggccg

SEQ ID NO: 115 - DNA, 17 bp, Homo sapiens
gcccaagcccaggccgg

SEQ ID NO: 116 - DNA, 17 bp, Homo sapiens
cccaagcccaggccggg

SEQ ID NO: 117 - DNA, 17 bp, Homo sapiens
ccaagcccaggccgggg

SEQ ID NO: 118 - DNA, 17 bp, Homo sapiens
caagcccaggccggggc

SEQ ID NO: 119 - DNA, 17 bp, Homo sapiens
aagcccaggccggggcc

SEQ ID NO: 120 - DNA, 17 bp, Homo sapiens
agcccaggccggggccg

SEQ ID NO: 121 - DNA, 17 bp, Homo sapiens
gcccaggccggggccgg

SEQ ID NO: 122 - DNA, 17 bp, Homo sapiens
cccaggccggggccgga

SEQ ID NO: 123 - DNA, 17 bp, Homo sapiens
ccaggccggggccggag

SEQ ID NO: 124 - DNA, 17 bp, Homo sapiens
caggccggggccggagc

SEQ ID NO: 125 - DNA, 17 bp, Homo sapiens
aggccggggccggagca

SEQ ID NO: 126 - DNA, 17 bp, Homo sapiens
ggccggggccggagcag

SEQ ID NO: 127 - DNA, 17 bp, Homo sapiens
gccggggccggagcaga

SEQ ID NO: 128 - DNA, 17 bp, Homo sapiens
ccggggccggagcagaa

SEQ ID NO: 129 - DNA, 17 bp, Homo sapiens
cggggccggagcagaag

SEQ ID NO: 130 - DNA, 17 bp, Homo sapiens
ggggccggagcagaagc

SEQ ID NO: 131 - DNA, 17 bp, Homo sapiens
gggccggagcagaagcc

SEQ ID NO: 132 - DNA, 17 bp, Homo sapiens
ggccggagcagaagccc

SEQ ID NO: 133 - DNA, 17 bp, Homo sapiens
gccggagcagaagccca

SEQ ID NO: 134 - DNA, 17 bp, Homo sapiens
ccggagcagaagcccaa

SEQ ID NO: 135 - DNA, 17 bp, Homo sapiens
cggagcagaagcccaag

SEQ ID NO: 136 - DNA, 17 bp, Homo sapiens
ggagcagaagcccaagc

SEQ ID NO: 137 - DNA, 17 bp, Homo sapiens
gagcagaagcccaagct

SEQ ID NO: 138 - DNA, 17 bp, Homo sapiens
agcagaagcccaagctc

SEQ ID NO: 139 - DNA, 17 bp, Homo sapiens
gcagaagcccaagctca

SEQ ID NO: 140 - DNA, 17 bp, Homo sapiens
cagaagcccaagctcac

SEQ ID NO: 141 - DNA, 17 bp, Homo sapiens
agaagcccaagctcacc

SEQ ID NO: 142 - DNA, 17 bp, Homo sapiens
gaagcccaagctcacca

SEQ ID NO: 143 - DNA, 17 bp, Homo sapiens
aagcccaagctcaccaa

SEQ ID NO: 144 - DNA, 17 bp, Homo sapiens
agcccaagctcaccaaa

SEQ ID NO: 145 - DNA, 17 bp, Homo sapiens
gcccaagctcaccaaac

SEQ ID NO: 146 - DNA, 17 bp, Homo sapiens
cccaagctcaccaaacc

SEQ ID NO: 147 - DNA, 17 bp, Homo sapiens
ccaagctcaccaaaccg

SEQ ID NO: 148 - DNA, 17 bp, Homo sapiens
caagctcaccaaaccgg

SEQ ID NO: 149 - DNA, 17 bp, Homo sapiens
aagctcaccaaaccgga

SEQ ID NO: 150 - DNA, 17 bp, Homo sapiens
agctcaccaaaccggac

SEQ ID NO: 151 - DNA, 17 bp, Homo sapiens
gctcaccaaaccggact

SEQ ID NO: 152 - DNA, 17 bp, Homo sapiens
ctcaccaaaccggactc

SEQ ID NO: 153 - DNA, 17 bp, Homo sapiens
tcaccaaaccggactct

SEQ ID NO: 154 - DNA, 17 bp, Homo sapiens
caccaaaccggactctg

SEQ ID NO: 155 - DNA, 17 bp, Homo sapiens
accaaaccggactctgc

SEQ ID NO: 156 - DNA, 17 bp, Homo sapiens
ccaaaccggactctgcc

SEQ ID NO: 157 - DNA, 17 bp, Homo sapiens
caaaccggactctgcca

SEQ ID NO: 158 - DNA, 17 bp, Homo sapiens
aaaccggactctgccac

SEQ ID NO: 159 - DNA, 17 bp, Homo sapiens
aaccggactctgccacc

SEQ ID NO: 160 - DNA, 17 bp, Homo sapiens
accggactctgccaccg

SEQ ID NO: 161 - DNA, 17 bp, Homo sapiens
ccggactctgccaccgg

SEQ ID NO: 162 - DNA, 17 bp, Homo sapiens
cggactctgccaccggg

SEQ ID NO: 163 - DNA, 17 bp, Homo sapiens
ggactctgccaccgggc

SEQ ID NO: 164 - DNA, 17 bp, Homo sapiens
gactctgccaccgggcc

SEQ ID NO: 165 - DNA, 17 bp, Homo sapiens
actctgccaccgggccg

SEQ ID NO: 166 - DNA, 17 bp, Homo sapiens
ctctgccaccgggccgc

SEQ ID NO: 167 - DNA, 17 bp, Homo sapiens
tctgccaccgggccgca

SEQ ID NO: 168 - DNA, 17 bp, Homo sapiens
ctgccaccgggccgcag

SEQ ID NO: 169 - DNA, 17 bp, Homo sapiens
tgccaccgggccgcagt

SEQ ID NO: 170 - DNA, 17 bp, Homo sapiens
gccaccgggccgcagtg

SEQ ID NO: 171 - DNA, 17 bp, Homo sapiens
ccaccgggccgcagtgg

SEQ ID NO: 172 - DNA, 17 bp, Homo sapiens
caccgggccgcagtggt

SEQ ID NO: 173 - DNA, 17 bp, Homo sapiens
accgggccgcagtggta

SEQ ID NO: 174 - DNA, 17 bp, Homo sapiens
ccgggccgcagtggtac

SEQ ID NO: 175 - DNA, 17 bp, Homo sapiens
cgggccgcagtggtacc

SEQ ID NO: 176 - DNA, 17 bp, Homo sapiens
gggccgcagtggtacca

SEQ ID NO: 177 - DNA, 17 bp, Homo sapiens
ggccgcagtggtaccag

SEQ ID NO: 178 - DNA, 17 bp, Homo sapiens
gccgcagtggtaccagg

SEQ ID NO: 179 - DNA, 17 bp, Homo sapiens
ccgcagtggtaccagga

SEQ ID NO: 180 - DNA, 17 bp, Homo sapiens
cgcagtggtaccaggaa

SEQ ID NO: 181 - DNA, 17 bp, Homo sapiens
gcagtggtaccaggaat

SEQ ID NO: 182 - DNA, 17 bp, Homo sapiens
cagtggtaccaggaatc

SEQ ID NO: 183 - DNA, 17 bp, Homo sapiens
agtggtaccaggaatct

SEQ ID NO: 184 - DNA, 17 bp, Homo sapiens
gtggtaccaggaatctc

SEQ ID NO: 185 - DNA, 17 bp, Homo sapiens
tggtaccaggaatctca

SEQ ID NO: 186 - DNA, 17 bp, Homo sapiens
ggtaccaggaatctcag

SEQ ID NO: 187 - DNA, 17 bp, Homo sapiens
gtaccaggaatctcagg

SEQ ID NO: 188 - DNA, 17 bp, Homo sapiens
taccaggaatctcagga

SEQ ID NO: 189 - DNA, 17 bp, Homo sapiens
accaggaatctcaggaa

SEQ ID NO: 190 - DNA, 17 bp, Homo sapiens
ccaggaatctcaggaat

SEQ ID NO: 191 - DNA, 17 bp, Homo sapiens
caggaatctcaggaatc

SEQ ID NO: 192 - DNA, 17 bp, Homo sapiens
aggaatctcaggaatcg

SEQ ID NO: 193 - DNA, 17 bp, Homo sapiens
ggaatctcaggaatcgg

SEQ ID NO: 194 - DNA, 17 bp, Homo sapiens
gaatctcaggaatcgga

SEQ ID NO: 195 - DNA, 17 bp, Homo sapiens
aatctcaggaatcggag

SEQ ID NO: 196 - DNA, 17 bp, Homo sapiens
atctcaggaatcggagt

SEQ ID NO: 197 - DNA, 17 bp, Homo sapiens
tctcaggaatcggagtc

SEQ ID NO: 198 - DNA, 17 bp, Homo sapiens
ctcaggaatcggagtcg

SEQ ID NO: 199 - DNA, 17 bp, Homo sapiens
tcaggaatcggagtcgg

SEQ ID NO: 200 - DNA, 17 bp, Homo sapiens
caggaatcggagtcgga

SEQ ID NO: 201 - DNA, 17 bp, Homo sapiens
aggaatcggagtcggaa

SEQ ID NO: 202 - DNA, 17 bp, Homo sapiens
ggaatcggagtcggaag

SEQ ID NO: 203 - DNA, 17 bp, Homo sapiens
gaatcggagtcggaagg

SEQ ID NO: 204 - DNA, 17 bp, Homo sapiens
aatcggagtcggaaggc

SEQ ID NO: 205 - DNA, 17 bp, Homo sapiens
atcggagtcggaaggca

SEQ ID NO: 206 - DNA, 17 bp, Homo sapiens
tcggagtcggaaggcaa

SEQ ID NO: 207 - DNA, 17 bp, Homo sapiens
cggagtcggaaggcaag

SEQ ID NO: 208 - DNA, 17 bp, Homo sapiens
ggagtcggaaggcaagc

SEQ ID NO: 209 - DNA, 17 bp, Homo sapiens
gagtcggaaggcaagca

SEQ ID NO: 210 - DNA, 17 bp, Homo sapiens
agtcggaaggcaagcag

SEQ ID NO: 211 - DNA, 17 bp, Homo sapiens
gtcggaaggcaagcagc

SEQ ID NO: 212 - DNA, 17 bp, Homo sapiens
tcggaaggcaagcagcc

SEQ ID NO: 213 - DNA, 17 bp, Homo sapiens
cggaaggcaagcagcca

SEQ ID NO: 214 - DNA, 17 bp, Homo sapiens
ggaaggcaagcagccac

SEQ ID NO: 215 - DNA, 17 bp, Homo sapiens
gaaggcaagcagccacc

SEQ ID NO: 216 - DNA, 17 bp, Homo sapiens
aaggcaagcagccaccc

SEQ ID NO: 217 - DNA, 17 bp, Homo sapiens
aggcaagcagccacccc

SEQ ID NO: 218 - DNA, 17 bp, Homo sapiens
ggcaagcagccaccccc

SEQ ID NO: 219 - DNA, 17 bp, Homo sapiens
gcaagcagccacccccg

SEQ ID NO: 220 - DNA, 17 bp, Homo sapiens
caagcagccacccccgg

SEQ ID NO: 221 - DNA, 17 bp, Homo sapiens
aagcagccacccccggg

SEQ ID NO: 222 - DNA, 17 bp, Homo sapiens
agcagccacccccggga

SEQ ID NO: 223 - DNA, 17 bp, Homo sapiens
gcagccacccccgggac

SEQ ID NO: 224 - DNA, 17 bp, Homo sapiens
cagccacccccgggacc

SEQ ID NO: 225 - DNA, 17 bp, Homo sapiens
agccacccccgggaccc

SEQ ID NO: 226 - DNA, 17 bp, Homo sapiens
gccacccccgggacccc

SEQ ID NO: 227 - DNA, 17 bp, Homo sapiens
ccacccccgggacccct

SEQ ID NO: 228 - DNA, 17 bp, Homo sapiens
cacccccgggacccctg

SEQ ID NO: 229 - DNA, 17 bp, Homo sapiens
acccccgggacccctgg

SEQ ID NO: 230 - DNA, 17 bp, Homo sapiens
cccccgggacccctggc

SEQ ID NO: 231 - DNA, 17 bp, Homo sapiens
ccccgggacccctggca

SEQ ID NO: 232 - DNA, 17 bp, Homo sapiens
cccgggacccctggcac

SEQ ID NO: 233 - DNA, 17 bp, Homo sapiens
ccgggacccctggcacc

SEQ ID NO: 234 - DNA, 17 bp, Homo sapiens
cgggacccctggcaccc

SEQ ID NO: 235 - DNA, 17 bp, Homo sapiens
gggacccctggcacccc

SEQ ID NO: 236 - DNA, 17 bp, Homo sapiens
ggacccctggcaccccc

SEQ ID NO: 237 - DNA, 17 bp, Homo sapiens
gacccctggcacccccg

SEQ ID NO: 238 - DNA, 17 bp, Homo sapiens
acccctggcacccccga

SEQ ID NO: 239 - DNA, 17 bp, Homo sapiens
cccctggcacccccgaa

SEQ ID NO: 240 - DNA, 17 bp, Homo sapiens
ccctggcacccccgaaa

SEQ ID NO: 241 - DNA, 17 bp, Homo sapiens
cctggcacccccgaaat

SEQ ID NO: 242 - DNA, 17 bp, Homo sapiens
ctggcacccccgaaatc

SEQ ID NO: 243 - DNA, 17 bp, Homo sapiens
tggcacccccgaaatcc

SEQ ID NO: 244 - DNA, 17 bp, Homo sapiens
ggcacccccgaaatccc

SEQ ID NO: 245 - DNA, 17 bp, Homo sapiens
gcacccccgaaatcccc

SEQ ID NO: 246 - DNA, 17 bp, Homo sapiens
cacccccgaaatccccc

SEQ ID NO: 247 - DNA, 17 bp, Homo sapiens
acccccgaaatcccccg

SEQ ID NO: 248 - DNA, 17 bp, Homo sapiens
cccccgaaatcccccga

SEQ ID NO: 249 - DNA, 17 bp, Homo sapiens
ccccgaaatcccccgaa

SEQ ID NO: 250 - DNA, 17 bp, Homo sapiens
cccgaaatcccccgaac

SEQ ID NO: 251 - DNA, 17 bp, Homo sapiens
ccgaaatcccccgaacc

SEQ ID NO: 252 - DNA, 17 bp, Homo sapiens
cgaaatcccccgaaccc

SEQ ID NO: 253 - DNA, 17 bp, Homo sapiens
gaaatcccccgaaccct

SEQ ID NO: 254 - DNA, 17 bp, Homo sapiens
aaatcccccgaaccctc

SEQ ID NO: 255 - DNA, 17 bp, Homo sapiens
aatcccccgaaccctca

SEQ ID NO: 256 - DNA, 17 bp, Homo sapiens
atcccccgaaccctcag

SEQ ID NO: 257 - DNA, 17 bp, Homo sapiens
tcccccgaaccctcagg

SEQ ID NO: 258 - DNA, 17 bp, Homo sapiens
cccccgaaccctcagga

SEQ ID NO: 259 - DNA, 17 bp, Homo sapiens
ccccgaaccctcaggac

SEQ ID NO: 260 - DNA, 17 bp, Homo sapiens
cccgaaccctcaggacc

SEQ ID NO: 261 - DNA, 17 bp, Homo sapiens
ccgaaccctcaggaccc

SEQ ID NO: 262 - DNA, 17 bp, Homo sapiens
cgaaccctcaggacccc

SEQ ID NO: 263 - DNA, 17 bp, Homo sapiens
gaaccctcaggacccct

SEQ ID NO: 264 - DNA, 17 bp, Homo sapiens
aaccctcaggacccctg

SEQ ID NO: 265 - DNA, 17 bp, Homo sapiens
accctcaggacccctgg

SEQ ID NO: 266 - DNA, 17 bp, Homo sapiens
ccctcaggacccctggc

SEQ ID NO: 267 - DNA, 17 bp, Homo sapiens
cctcaggacccctggcg

SEQ ID NO: 268 - DNA, 17 bp, Homo sapiens
ctcaggacccctggcgt

SEQ ID NO: 269 - DNA, 17 bp, Homo sapiens
tcaggacccctggcgtc

SEQ ID NO: 270 - DNA, 17 bp, Homo sapiens
caggacccctggcgtcg

SEQ ID NO: 271 - DNA, 17 bp, Homo sapiens
aggacccctggcgtcgg

SEQ ID NO: 272 - DNA, 17 bp, Homo sapiens
ggacccctggcgtcgga

SEQ ID NO: 273 - DNA, 17 bp, Homo sapiens
gacccctggcgtcggag

SEQ ID NO: 274 - DNA, 17 bp, Homo sapiens
acccctggcgtcggagc

SEQ ID NO: 275 - DNA, 17 bp, Homo sapiens
cccctggcgtcggagca

SEQ ID NO: 276 - DNA, 17 bp, Homo sapiens
ccctggcgtcggagcag

SEQ ID NO: 277 - DNA, 17 bp, Homo sapiens
cctggcgtcggagcagg

SEQ ID NO: 278 - DNA, 17 bp, Homo sapiens
ctggcgtcggagcagga

SEQ ID NO: 279 - DNA, 17 bp, Homo sapiens
tggcgtcggagcaggat

SEQ ID NO: 280 - DNA, 17 bp, Homo sapiens
ggcgtcggagcaggatg

SEQ ID NO: 281 - DNA, 17 bp, Homo sapiens
gcgtcggagcaggatgc

SEQ ID NO: 282 - DNA, 17 bp, Homo sapiens
cgtcggagcaggatgca

SEQ ID NO: 283 - DNA, 17 bp, Homo sapiens
gtcggagcaggatgcac

SEQ ID NO: 284 - DNA, 17 bp, Homo sapiens
tcggagcaggatgcacc

SEQ ID NO: 285 - DNA, 17 bp, Homo sapiens
cggagcaggatgcaccc

SEQ ID NO: 286 - DNA, 17 bp, Homo sapiens
ggagcaggatgcacccc

SEQ ID NO: 287 - DNA, 17 bp, Homo sapiens
gagcaggatgcacccct

SEQ ID NO: 288 - DNA, 17 bp, Homo sapiens
agcaggatgcacccctg

SEQ ID NO: 289 - DNA, 17 bp, Homo sapiens
gcaggatgcacccctgc

SEQ ID NO: 290 - DNA, 17 bp, Homo sapiens
caggatgcacccctgcc

SEQ ID NO: 291 - DNA, 17 bp, Homo sapiens
aggatgcacccctgcca

SEQ ID NO: 292 - DNA, 17 bp, Homo sapiens
ggatgcacccctgccag

SEQ ID NO: 293 - DNA, 17 bp, Homo sapiens
gatgcacccctgccaga

SEQ ID NO: 294 - DNA, 17 bp, Homo sapiens
atgcacccctgccagag

SEQ ID NO: 295 - DNA, 17 bp, Homo sapiens
tgcacccctgccagagg

SEQ ID NO: 296 - DNA, 17 bp, Homo sapiens
gcacccctgccagaggg

SEQ ID NO: 297 - DNA, 17 bp, Homo sapiens
cacccctgccagagggg

SEQ ID NO: 298 - DNA, 17 bp, Homo sapiens
acccctgccagaggggg

SEQ ID NO: 299 - DNA, 17 bp, Homo sapiens
cccctgccagaggggga

SEQ ID NO: 300 - DNA, 17 bp, Homo sapiens
ccctgccagagggggac

SEQ ID NO: 301 - DNA, 17 bp, Homo sapiens
cctgccagagggggacg

SEQ ID NO: 302 - DNA, 17 bp, Homo sapiens
ctgccagagggggacga

SEQ ID NO: 303 - DNA, 17 bp, Homo sapiens
tgccagagggggacgat

SEQ ID NO: 304 - DNA, 17 bp, Homo sapiens
gccagagggggacgatg

SEQ ID NO: 305 - DNA, 17 bp, Homo sapiens
ccagagggggacgatgc

SEQ ID NO: 306 - DNA, 17 bp, Homo sapiens
cagagggggacgatgca

SEQ ID NO: 307 - DNA, 17 bp, Homo sapiens
agagggggacgatgcac

SEQ ID NO: 308 - DNA, 17 bp, Homo sapiens
gagggggacgatgcacc

SEQ ID NO: 309 - DNA, 17 bp, Homo sapiens
agggggacgatgcaccc

SEQ ID NO: 310 - DNA, 17 bp, Homo sapiens
gggggacgatgcacccc

SEQ ID NO: 311 - DNA, 17 bp, Homo sapiens
ggggacgatgcaccccc

SEQ ID NO: 312 - DNA, 17 bp, Homo sapiens
gggacgatgcacccccc

SEQ ID NO: 313 - DNA, 17 bp, Homo sapiens
ggacgatgcaccccccc

SEQ ID NO: 314 - DNA, 17 bp, Homo sapiens
gacgatgcacccccccg

SEQ ID NO: 315 - DNA, 17 bp, Homo sapiens
acgatgcacccccccgg

SEQ ID NO: 316 - DNA, 17 bp, Homo sapiens
cgatgcacccccccggc

SEQ ID NO: 317 - DNA, 17 bp, Homo sapiens
gatgcacccccccggcc

SEQ ID NO: 318 - DNA, 17 bp, Homo sapiens
atgcacccccccggccg

SEQ ID NO: 319 - DNA, 17 bp, Homo sapiens
tgcacccccccggccgt

SEQ ID NO: 320 - DNA, 17 bp, Homo sapiens
gcacccccccggccgtc

SEQ ID NO: 321 - DNA, 17 bp, Homo sapiens
cacccccccggccgtcg

SEQ ID NO: 322 - DNA, 17 bp, Homo sapiens
acccccccggccgtcga

SEQ ID NO: 323 - DNA, 17 bp, Homo sapiens
cccccccggccgtcgat

SEQ ID NO: 324 - DNA, 17 bp, Homo sapiens
ccccccggccgtcgatg

SEQ ID NO: 325 - DNA, 17 bp, Homo sapiens
cccccggccgtcgatgc

SEQ ID NO: 326 - DNA, 17 bp, Homo sapiens
ccccggccgtcgatgct

SEQ ID NO: 327 - DNA, 17 bp, Homo sapiens
cccggccgtcgatgctg

SEQ ID NO: 328 - DNA, 17 bp, Homo sapiens
ccggccgtcgatgctgg

SEQ ID NO: 329 - DNA, 17 bp, Homo sapiens
cggccgtcgatgctgga

SEQ ID NO: 330 - DNA, 17 bp, Homo sapiens
ggccgtcgatgctggac

SEQ ID NO: 331 - DNA, 17 bp, Homo sapiens
gccgtcgatgctggacg

SEQ ID NO: 332 - DNA, 17 bp, Homo sapiens
ccgtcgatgctggacga

SEQ ID NO: 333 - DNA, 17 bp, Homo sapiens
cgtcgatgctggacgat

SEQ ID NO: 334 - DNA, 17 bp, Homo sapiens
gtcgatgctggacgatg

SEQ ID NO: 335 - DNA, 17 bp, Homo sapiens
tcgatgctggacgatgc

SEQ ID NO: 336 - DNA, 17 bp, Homo sapiens
cgatgctggacgatgca

SEQ ID NO: 337 - DNA, 17 bp, Homo sapiens
gatgctggacgatgcac

SEQ ID NO: 338 - DNA, 17 bp, Homo sapiens
atgctggacgatgcacc

SEQ ID NO: 339 - DNA, 17 bp, Homo sapiens
tgctggacgatgcaccc

SEQ ID NO: 340 - DNA, 17 bp, Homo sapiens
gctggacgatgcacccc

SEQ ID NO: 341 - DNA, 17 bp, Homo sapiens
ctggacgatgcaccccg

SEQ ID NO: 342 - DNA, 17 bp, Homo sapiens
tggacgatgcaccccgc

SEQ ID NO: 343 - DNA, 17 bp, Homo sapiens
ggacgatgcaccccgcc

SEQ ID NO: 344 - DNA, 17 bp, Homo sapiens
gacgatgcaccccgcct

SEQ ID NO: 345 - DNA, 17 bp, Homo sapiens
acgatgcaccccgcctg

SEQ ID NO: 346 - DNA, 17 bp, Homo sapiens
cgatgcaccccgcctgc

SEQ ID NO: 347 - DNA, 17 bp, Homo sapiens
gatgcaccccgcctgcc

SEQ ID NO: 348 - DNA, 17 bp, Homo sapiens
atgcaccccgcctgccg

SEQ ID NO: 349 - DNA, 17 bp, Homo sapiens
tgcaccccgcctgccgc

SEQ ID NO: 350 - DNA, 17 bp, Homo sapiens
gcaccccgcctgccgct

SEQ ID NO: 351 - DNA, 17 bp, Homo sapiens
caccccgcctgccgctg

SEQ ID NO: 352 - DNA, 17 bp, Homo sapiens
accccgcctgccgctgg

SEQ ID NO: 353 - DNA, 17 bp, Homo sapiens
ccccgcctgccgctgga

SEQ ID NO: 354 - DNA, 17 bp, Homo sapiens
cccgcctgccgctggag

SEQ ID NO: 355 - DNA, 17 bp, Homo sapiens
ccgcctgccgctggagc

SEQ ID NO: 356 - DNA, 17 bp, Homo sapiens
cgcctgccgctggagct

SEQ ID NO: 357 - DNA, 17 bp, Homo sapiens
gcctgccgctggagctg

SEQ ID NO: 358 - DNA, 17 bp, Homo sapiens
cctgccgctggagctgg

SEQ ID NO: 359 - DNA, 17 bp, Homo sapiens
ctgccgctggagctgga

SEQ ID NO: 360 - DNA, 17 bp, Homo sapiens
tgccgctggagctggac

SEQ ID NO: 361 - DNA, 17 bp, Homo sapiens
gccgctggagctggacg

SEQ ID NO: 362 - DNA, 17 bp, Homo sapiens
ccgctggagctggacga

SEQ ID NO: 363 - DNA, 17 bp, Homo sapiens
cgctggagctggacgat

SEQ ID NO: 364 - DNA, 17 bp, Homo sapiens
gctggagctggacgatg

SEQ ID NO: 365 - DNA, 17 bp, Homo sapiens
ctggagctggacgatgc

SEQ ID NO: 366 - DNA, 17 bp, Homo sapiens
tggagctggacgatgca

SEQ ID NO: 367 - DNA, 17 bp, Homo sapiens
ggagctggacgatgcac

SEQ ID NO: 368 - DNA, 17 bp, Homo sapiens
gagctggacgatgcacc

SEQ ID NO: 369 - DNA, 17 bp, Homo sapiens
agctggacgatgcaccc

SEQ ID NO: 370 - DNA, 17 bp, Homo sapiens
gctggacgatgcacccc

SEQ ID NO: 371 - DNA, 17 bp, Homo sapiens
ctggacgatgcacccct

SEQ ID NO: 372 - DNA, 17 bp, Homo sapiens
tggacgatgcacccctg

SEQ ID NO: 373 - DNA, 17 bp, Homo sapiens
ggacgatgcacccctgc

SEQ ID NO: 374 - DNA, 17 bp, Homo sapiens
gacgatgcacccctgcc

SEQ ID NO: 375 - DNA, 17 bp, Homo sapiens
acgatgcacccctgccg

SEQ ID NO: 376 - DNA, 17 bp, Homo sapiens
cgatgcacccctgccgg

SEQ ID NO: 377 - DNA, 17 bp, Homo sapiens
gatgcacccctgccgga

SEQ ID NO: 378 - DNA, 17 bp, Homo sapiens
atgcacccctgccggag

SEQ ID NO: 379 - DNA, 17 bp, Homo sapiens
tgcacccctgccggagg

SEQ ID NO: 380 - DNA, 17 bp, Homo sapiens
gcacccctgccggagga

SEQ ID NO: 381 - DNA, 17 bp, Homo sapiens
cacccctgccggaggag

SEQ ID NO: 382 - DNA, 17 bp, Homo sapiens
acccctgccggaggagg

SEQ ID NO: 383 - DNA, 17 bp, Homo sapiens
cccctgccggaggagga

SEQ ID NO: 384 - DNA, 17 bp, Homo sapiens
ccctgccggaggaggaa

SEQ ID NO: 385 - DNA, 17 bp, Homo sapiens
cctgccggaggaggaaa

SEQ ID NO: 386 - DNA, 17 bp, Homo sapiens
ctgccggaggaggaaac

SEQ ID NO: 387 - DNA, 17 bp, Homo sapiens
tgccggaggaggaaacc

SEQ ID NO: 388 - DNA, 17 bp, Homo sapiens
gccggaggaggaaaccc

SEQ ID NO: 389 - DNA, 17 bp, Homo sapiens
ccggaggaggaaacccc

SEQ ID NO: 390 - DNA, 17 bp, Homo sapiens
cggaggaggaaaccccc

SEQ ID NO: 391 - DNA, 17 bp, Homo sapiens
ggaggaggaaacccccg

SEQ ID NO: 392 - DNA, 17 bp, Homo sapiens
gaggaggaaacccccga

SEQ ID NO: 393 - DNA, 17 bp, Homo sapiens
aggaggaaacccccgaa

SEQ ID NO: 394 - DNA, 17 bp, Homo sapiens
ggaggaaacccccgaac

SEQ ID NO: 395 - DNA, 17 bp, Homo sapiens
gaggaaacccccgaacc

SEQ ID NO: 396 - DNA, 17 bp, Homo sapiens
aggaaacccccgaaccc

SEQ ID NO: 397 - DNA, 17 bp, Homo sapiens
ggaaacccccgaaccca

SEQ ID NO: 398 - DNA, 17 bp, Homo sapiens
gaaacccccgaacccac

SEQ ID NO: 399 - DNA, 17 bp, Homo sapiens
aaacccccgaacccacg

SEQ ID NO: 400 - DNA, 17 bp, Homo sapiens
aacccccgaacccacgg

SEQ ID NO: 401 - DNA, 17 bp, Homo sapiens
acccccgaacccacggc

SEQ ID NO: 402 - DNA, 17 bp, Homo sapiens
cccccgaacccacggcc

SEQ ID NO: 403 - DNA, 17 bp, Homo sapiens
ccccgaacccacggcca

SEQ ID NO: 404 - DNA, 17 bp, Homo sapiens
cccgaacccacggccat

SEQ ID NO: 405 - DNA, 17 bp, Homo sapiens
ccgaacccacggccatc

SEQ ID NO: 406 - DNA, 17 bp, Homo sapiens
cgaacccacggccatct

SEQ ID NO: 407 - DNA, 17 bp, Homo sapiens
gaacccacggccatctg

SEQ ID NO: 408 - DNA, 17 bp, Homo sapiens
aacccacggccatctgc

SEQ ID NO: 409 - DNA, 17 bp, Homo sapiens
acccacggccatctgca

SEQ ID NO: 410 - DNA, 17 bp, Homo sapiens
cccacggccatctgcag

SEQ ID NO: 411 - DNA, 17 bp, Homo sapiens
ccacggccatctgcagg

SEQ ID NO: 412 - DNA, 17 bp, Homo sapiens
cacggccatctgcaggc

SEQ ID NO: 413 - DNA, 17 bp, Homo sapiens
acggccatctgcaggca

SEQ ID NO: 414 - DNA, 17 bp, Homo sapiens
cggccatctgcaggcac

SEQ ID NO: 415 - DNA, 17 bp, Homo sapiens
ggccatctgcaggcacc

SEQ ID NO: 416 - DNA, 17 bp, Homo sapiens
gccatctgcaggcaccg

SEQ ID NO: 417 - DNA, 17 bp, Homo sapiens
ccatctgcaggcaccgg

SEQ ID NO: 418 - DNA, 17 bp, Homo sapiens
catctgcaggcaccggc

SEQ ID NO: 419 - DNA, 17 bp, Homo sapiens
atctgcaggcaccggca

SEQ ID NO: 420 - DNA, 17 bp, Homo sapiens
tctgcaggcaccggcac

SEQ ID NO: 421 - DNA, 17 bp, Homo sapiens
ctgcaggcaccggcacc

SEQ ID NO: 422 - DNA, 17 bp, Homo sapiens
tgcaggcaccggcaccg

SEQ ID NO: 423 - DNA, 17 bp, Homo sapiens
gcaggcaccggcaccgc

SEQ ID NO: 424 - DNA, 17 bp, Homo sapiens
caggcaccggcaccgct

SEQ ID NO: 425 - DNA, 17 bp, Homo sapiens
aggcaccggcaccgctg

SEQ ID NO: 426 - DNA, 17 bp, Homo sapiens
ggcaccggcaccgctgt

SEQ ID NO: 427 - DNA, 17 bp, Homo sapiens
gcaccggcaccgctgtc

SEQ ID NO: 428 - DNA, 17 bp, Homo sapiens
caccggcaccgctgtca

SEQ ID NO: 429 - DNA, 17 bp, Homo sapiens
accggcaccgctgtcac

SEQ ID NO: 430 - DNA, 17 bp, Homo sapiens
ccggcaccgctgtcaca

SEQ ID NO: 431 - DNA, 17 bp, Homo sapiens
cggcaccgctgtcacac

SEQ ID NO: 432 - DNA, 17 bp, Homo sapiens
ggcaccgctgtcacacc

SEQ ID NO: 433 - DNA, 17 bp, Homo sapiens
gcaccgctgtcacaccg

SEQ ID NO: 434 - DNA, 17 bp, Homo sapiens
caccgctgtcacaccga

SEQ ID NO: 435 - DNA, 17 bp, Homo sapiens
accgctgtcacaccgac

SEQ ID NO: 436 - DNA, 17 bp, Homo sapiens
ccgctgtcacaccgact

SEQ ID NO: 437 - DNA, 17 bp, Homo sapiens
cgctgtcacaccgactg

SEQ ID NO: 438 - DNA, 17 bp, Homo sapiens
gctgtcacaccgactgc

SEQ ID NO: 439 - DNA, 17 bp, Homo sapiens
ctgtcacaccgactgcc

SEQ ID NO: 440 - DNA, 17 bp, Homo sapiens
tgtcacaccgactgcct

SEQ ID NO: 441 - DNA, 17 bp, Homo sapiens
gtcacaccgactgccta

SEQ ID NO: 442 - DNA, 17 bp, Homo sapiens
tcacaccgactgcctag

SEQ ID NO: 443 - DNA, 17 bp, Homo sapiens
cacaccgactgcctaga

SEQ ID NO: 444 - DNA, 17 bp, Homo sapiens
acaccgactgcctagag

SEQ ID NO: 445 - DNA, 17 bp, Homo sapiens
caccgactgcctagagg

SEQ ID NO: 446 - DNA, 17 bp, Homo sapiens
accgactgcctagaggg

SEQ ID NO: 447 - DNA, 17 bp, Homo sapiens
ccgactgcctagagggg

SEQ ID NO: 448 - DNA, 17 bp, Homo sapiens
cgactgcctagaggggc

SEQ ID NO: 449 - DNA, 17 bp, Homo sapiens
gactgcctagaggggct

SEQ ID NO: 450 - DNA, 17 bp, Homo sapiens
actgcctagaggggctg

SEQ ID NO: 451 - DNA, 17 bp, Homo sapiens
ctgcctagaggggctgc

SEQ ID NO: 452 - DNA, 17 bp, Homo sapiens
tgcctagaggggctgct

SEQ ID NO: 453 - DNA, 17 bp, Homo sapiens
gcctagaggggctgctg

SEQ ID NO: 454 - DNA, 17 bp, Homo sapiens
cctagaggggctgctgt

SEQ ID NO: 455 - DNA, 17 bp, Homo sapiens
ctagaggggctgctgtc

SEQ ID NO: 456 - DNA, 17 bp, Homo sapiens
tagaggggctgctgtcc

SEQ ID NO: 457 - DNA, 17 bp, Homo sapiens
agaggggctgctgtccc

SEQ ID NO: 458 - DNA, 17 bp, Homo sapiens
gaggggctgctgtcccg

SEQ ID NO: 459 - DNA, 17 bp, Homo sapiens
aggggctgctgtcccgc

SEQ ID NO: 460 - DNA, 17 bp, Homo sapiens
ggggctgctgtcccgca

SEQ ID NO: 461 - DNA, 17 bp, Homo sapiens
gggctgctgtcccgcac

SEQ ID NO: 462 - DNA, 17 bp, Homo sapiens
ggctgctgtcccgcacc

SEQ ID NO: 463 - DNA, 17 bp, Homo sapiens
gctgctgtcccgcacct

SEQ ID NO: 464 - DNA, 17 bp, Homo sapiens
ctgctgtcccgcacctt

SEQ ID NO: 465 - DNA, 17 bp, Homo sapiens
tgctgtcccgcaccttc

SEQ ID NO: 466 - DNA, 17 bp, Homo sapiens
gctgtcccgcaccttcc

SEQ ID NO: 467 - DNA, 17 bp, Homo sapiens
ctgtcccgcaccttcca

SEQ ID NO: 468 - DNA, 17 bp, Homo sapiens
tgtcccgcaccttccag

SEQ ID NO: 469 - DNA, 17 bp, Homo sapiens
gtcccgcaccttccagt

SEQ ID NO: 470 - DNA, 17 bp, Homo sapiens
tcccgcaccttccagtg

SEQ ID NO: 471 - DNA, 17 bp, Homo sapiens
cccgcaccttccagtgg

SEQ ID NO: 472 - DNA, 17 bp, Homo sapiens
ccgcaccttccagtggc

SEQ ID NO: 473 - DNA, 17 bp, Homo sapiens
cgcaccttccagtggct

SEQ ID NO: 474 - DNA, 17 bp, Homo sapiens
gcaccttccagtggctg

SEQ ID NO: 475 - DNA, 17 bp, Homo sapiens
caccttccagtggctgg

SEQ ID NO: 476 - DNA, 17 bp, Homo sapiens
accttccagtggctggg

SEQ ID NO: 477 - DNA, 17 bp, Homo sapiens
ccttccagtggctgggg

SEQ ID NO: 478 - DNA, 17 bp, Homo sapiens
cttccagtggctggggt

SEQ ID NO: 479 - DNA, 17 bp, Homo sapiens
ttccagtggctggggtg

SEQ ID NO: 480 - DNA, 17 bp, Homo sapiens
tccagtggctggggtgg

SEQ ID NO: 481 - DNA, 17 bp, Homo sapiens
ccagtggctggggtggc

SEQ ID NO: 482 - DNA, 17 bp, Homo sapiens
cagtggctggggtggca

SEQ ID NO: 483 - DNA, 17 bp, Homo sapiens
agtggctggggtggcag

SEQ ID NO: 484 - DNA, 17 bp, Homo sapiens
gtggctggggtggcagg

SEQ ID NO: 485 - DNA, 17 bp, Homo sapiens
tggctggggtggcaggt

SEQ ID NO: 486 - DNA, 17 bp, Homo sapiens
ggctggggtggcaggtg

SEQ ID NO: 487 - DNA, 17 bp, Homo sapiens
gctggggtggcaggtgg

SEQ ID NO: 488 - DNA, 17 bp, Homo sapiens
ctggggtggcaggtggg

SEQ ID NO: 489 - DNA, 17 bp, Homo sapiens
tggggtggcaggtgggc

SEQ ID NO: 490 - DNA, 17 bp, Homo sapiens
ggggtggcaggtgggcg

SEQ ID NO: 491 - DNA, 17 bp, Homo sapiens
gggtggcaggtgggcgc

SEQ ID NO: 492 - DNA, 17 bp, Homo sapiens
ggtggcaggtgggcgcg

SEQ ID NO: 493 - DNA, 17 bp, Homo sapiens
gtggcaggtgggcgcgc

SEQ ID NO: 494 - DNA, 17 bp, Homo sapiens
tggcaggtgggcgcgca

SEQ ID NO: 495 - DNA, 17 bp, Homo sapiens
ggcaggtgggcgcgcac

SEQ ID NO: 496 - DNA, 17 bp, Homo sapiens
gcaggtgggcgcgcacc

SEQ ID NO: 497 - DNA, 17 bp, Homo sapiens
caggtgggcgcgcaccc

SEQ ID NO: 498 - DNA, 17 bp, Homo sapiens
aggtgggcgcgcacccc

SEQ ID NO: 499 - DNA, 17 bp, Homo sapiens
ggtgggcgcgcacccct

SEQ ID NO: 500 - DNA, 17 bp, Homo sapiens
gtgggcgcgcacccctg

SEQ ID NO: 501 - DNA, 17 bp, Homo sapiens
tgggcgcgcacccctgg

SEQ ID NO: 502 - DNA, 17 bp, Homo sapiens
gggcgcgcacccctgga

SEQ ID NO: 503 - DNA, 17 bp, Homo sapiens
ggcgcgcacccctggat

SEQ ID NO: 504 - DNA, 17 bp, Homo sapiens
gcgcgcacccctggatc

SEQ ID NO: 505 - DNA, 17 bp, Homo sapiens
cgcgcacccctggatct

SEQ ID NO: 506 - DNA, 17 bp, Homo sapiens
gcgcacccctggatctt

SEQ ID NO: 507 - DNA, 17 bp, Homo sapiens
cgcacccctggatcttc

SEQ ID NO: 508 - DNA, 17 bp, Homo sapiens
gcacccctggatcttcc

SEQ ID NO: 509 - DNA, 17 bp, Homo sapiens
cacccctggatcttcct

SEQ ID NO: 510 - DNA, 17 bp, Homo sapiens
acccctggatcttcctg

SEQ ID NO: 511 - DNA, 17 bp, Homo sapiens
cccctggatcttcctgc

SEQ ID NO: 512 - DNA, 17 bp, Homo sapiens
ccctggatcttcctgct

SEQ ID NO: 513 - DNA, 17 bp, Homo sapiens
cctggatcttcctgctg

SEQ ID NO: 514 - DNA, 17 bp, Homo sapiens
ctggatcttcctgctgg

SEQ ID NO: 515 - DNA, 17 bp, Homo sapiens
tggatcttcctgctggc

SEQ ID NO: 516 - DNA, 17 bp, Homo sapiens
ggatcttcctgctggcg

SEQ ID NO: 517 - DNA, 17 bp, Homo sapiens
gatcttcctgctggcgc

SEQ ID NO: 518 - DNA, 17 bp, Homo sapiens
atcttcctgctggcgcc

SEQ ID NO: 519 - DNA, 17 bp, Homo sapiens
tcttcctgctggcgccc

SEQ ID NO: 520 - DNA, 17 bp, Homo sapiens
cttcctgctggcgccct

SEQ ID NO: 521 - DNA, 17 bp, Homo sapiens
ttcctgctggcgccctt

SEQ ID NO: 522 - DNA, 17 bp, Homo sapiens
tcctgctggcgcccttg

SEQ ID NO: 523 - DNA, 17 bp, Homo sapiens
cctgctggcgcccttga

SEQ ID NO: 524 - DNA, 17 bp, Homo sapiens
ctgctggcgcccttgat

SEQ ID NO: 525 - DNA, 17 bp, Homo sapiens
tgctggcgcccttgatg

SEQ ID NO: 526 - DNA, 17 bp, Homo sapiens
gctggcgcccttgatgc

SEQ ID NO: 527 - DNA, 17 bp, Homo sapiens
ctggcgcccttgatgct

SEQ ID NO: 528 - DNA, 17 bp, Homo sapiens
tggcgcccttgatgctg

SEQ ID NO: 529 - DNA, 17 bp, Homo sapiens
ggcgcccttgatgctga

SEQ ID NO: 530 - DNA, 17 bp, Homo sapiens
gcgcccttgatgctgac

SEQ ID NO: 531 - DNA, 17 bp, Homo sapiens
cgcccttgatgctgaca

SEQ ID NO: 532 - DNA, 17 bp, Homo sapiens
gcccttgatgctgacag

SEQ ID NO: 533 - DNA, 17 bp, Homo sapiens
cccttgatgctgacagc

SEQ ID NO: 534 - DNA, 17 bp, Homo sapiens
ccttgatgctgacagcc

SEQ ID NO: 535 - DNA, 17 bp, Homo sapiens
cttgatgctgacagccg

SEQ ID NO: 536 - DNA, 17 bp, Homo sapiens
ttgatgctgacagccgc

SEQ ID NO: 537 - DNA, 17 bp, Homo sapiens
tgatgctgacagccgcg

SEQ ID NO: 538 - DNA, 17 bp, Homo sapiens
gatgctgacagccgcgc

SEQ ID NO: 539 - DNA, 17 bp, Homo sapiens
atgctgacagccgcgct

SEQ ID NO: 540 - DNA, 17 bp, Homo sapiens
tgctgacagccgcgctg

SEQ ID NO: 541 - DNA, 17 bp, Homo sapiens
gctgacagccgcgctgg

SEQ ID NO: 542 - DNA, 17 bp, Homo sapiens
ctgacagccgcgctggg

SEQ ID NO: 543 - DNA, 17 bp, Homo sapiens
tgacagccgcgctgggc

SEQ ID NO: 544 - DNA, 17 bp, Homo sapiens
gacagccgcgctgggca

SEQ ID NO: 545 - DNA, 17 bp, Homo sapiens
acagccgcgctgggcac

SEQ ID NO: 546 - DNA, 17 bp, Homo sapiens
cagccgcgctgggcacc

SEQ ID NO: 547 - DNA, 17 bp, Homo sapiens
agccgcgctgggcaccg

SEQ ID NO: 548 - DNA, 17 bp, Homo sapiens
gccgcgctgggcaccgg

SEQ ID NO: 549 - DNA, 17 bp, Homo sapiens
ccgcgctgggcaccggc

SEQ ID NO: 550 - DNA, 17 bp, Homo sapiens
cgcgctgggcaccggct

SEQ ID NO: 551 - DNA, 17 bp, Homo sapiens
gcgctgggcaccggctt

SEQ ID NO: 552 - DNA, 17 bp, Homo sapiens
cgctgggcaccggcttc

SEQ ID NO: 553 - DNA, 17 bp, Homo sapiens
gctgggcaccggcttcc

SEQ ID NO: 554 - DNA, 17 bp, Homo sapiens
ctgggcaccggcttcct

SEQ ID NO: 555 - DNA, 17 bp, Homo sapiens
tgggcaccggcttcctg

SEQ ID NO: 556 - DNA, 17 bp, Homo sapiens
gggcaccggcttcctgt

SEQ ID NO: 557 - DNA, 17 bp, Homo sapiens
ggcaccggcttcctgta

SEQ ID NO: 558 - DNA, 17 bp, Homo sapiens
gcaccggcttcctgtac

SEQ ID NO: 559 - DNA, 17 bp, Homo sapiens
caccggcttcctgtacc

SEQ ID NO: 560 - DNA, 17 bp, Homo sapiens
accggcttcctgtacct

SEQ ID NO: 561 - DNA, 17 bp, Homo sapiens
ccggcttcctgtaccta

SEQ ID NO: 562 - DNA, 17 bp, Homo sapiens
cggcttcctgtacctac

SEQ ID NO: 563 - DNA, 17 bp, Homo sapiens
ggcttcctgtacctacc

SEQ ID NO: 564 - DNA, 17 bp, Homo sapiens
gcttcctgtacctaccc

SEQ ID NO: 565 - DNA, 17 bp, Homo sapiens
cttcctgtacctaccca

SEQ ID NO: 566 - DNA, 17 bp, Homo sapiens
ttcctgtacctacccaa

SEQ ID NO: 567 - DNA, 17 bp, Homo sapiens
tcctgtacctacccaag

SEQ ID NO: 568 - DNA, 17 bp, Homo sapiens
cctgtacctacccaagg

SEQ ID NO: 569 - DNA, 17 bp, Homo sapiens
ctgtacctacccaagga

SEQ ID NO: 570 - DNA, 17 bp, Homo sapiens
tgtacctacccaaggac

SEQ ID NO: 571 - DNA, 17 bp, Homo sapiens
gtacctacccaaggacg

SEQ ID NO: 572 - DNA, 17 bp, Homo sapiens
tacctacccaaggacga

SEQ ID NO: 573 - DNA, 17 bp, Homo sapiens
acctacccaaggacgaa

SEQ ID NO: 574 - DNA, 17 bp, Homo sapiens
cctacccaaggacgaag

SEQ ID NO: 575 - DNA, 17 bp, Homo sapiens
ctacccaaggacgaaga

SEQ ID NO: 576 - DNA, 17 bp, Homo sapiens
tacccaaggacgaagag

SEQ ID NO: 577 - DNA, 17 bp, Homo sapiens
acccaaggacgaagagg

SEQ ID NO: 578 - DNA, 17 bp, Homo sapiens
cccaaggacgaagagga

SEQ ID NO: 579 - DNA, 17 bp, Homo sapiens
ccaaggacgaagaggaa

SEQ ID NO: 580 - DNA, 17 bp, Homo sapiens
caaggacgaagaggaag

SEQ ID NO: 581 - DNA, 17 bp, Homo sapiens
aaggacgaagaggaaga

SEQ ID NO: 582 - DNA, 17 bp, Homo sapiens
aggacgaagaggaagac

SEQ ID NO: 583 - DNA, 17 bp, Homo sapiens
ggacgaagaggaagacc

SEQ ID NO: 584 - DNA, 17 bp, Homo sapiens
gacgaagaggaagacct

SEQ ID NO: 585 - DNA, 17 bp, Homo sapiens
acgaagaggaagaccta

SEQ ID NO: 586 - DNA, 17 bp, Homo sapiens
cgaagaggaagacctag

SEQ ID NO: 587 - DNA, 17 bp, Homo sapiens
gaagaggaagacctaga

SEQ ID NO: 588 - DNA, 17 bp, Homo sapiens
aagaggaagacctagag

SEQ ID NO: 589 - DNA, 17 bp, Homo sapiens
agaggaagacctagagg

SEQ ID NO: 590 - DNA, 17 bp, Homo sapiens
gaggaagacctagagga

SEQ ID NO: 591 - DNA, 17 bp, Homo sapiens
aggaagacctagaggag

SEQ ID NO: 592 - DNA, 17 bp, Homo sapiens
ggaagacctagaggagc

SEQ ID NO: 593 - DNA, 17 bp, Homo sapiens
gaagacctagaggagca

SEQ ID NO: 594 - DNA, 17 bp, Homo sapiens
aagacctagaggagcat

SEQ ID NO: 595 - DNA, 17 bp, Homo sapiens
agacctagaggagcatt

SEQ ID NO: 596 - DNA, 17 bp, Homo sapiens
gacctagaggagcatta

SEQ ID NO: 597 - DNA, 17 bp, Homo sapiens
acctagaggagcattac

SEQ ID NO: 598 - DNA, 17 bp, Homo sapiens
cctagaggagcattaca

SEQ ID NO: 599 - DNA, 17 bp, Homo sapiens
ctagaggagcattacac

SEQ ID NO: 600 - DNA, 17 bp, Homo sapiens
tagaggagcattacacc

SEQ ID NO: 601 - DNA, 17 bp, Homo sapiens
agaggagcattacaccc

SEQ ID NO: 602 - DNA, 17 bp, Homo sapiens
gaggagcattacacccc

SEQ ID NO: 603 - DNA, 17 bp, Homo sapiens
aggagcattacacccct

SEQ ID NO: 604 - DNA, 17 bp, Homo sapiens
ggagcattacacccctg

SEQ ID NO: 605 - DNA, 17 bp, Homo sapiens
gagcattacacccctgt

SEQ ID NO: 606 - DNA, 17 bp, Homo sapiens
agcattacacccctgtg

SEQ ID NO: 607 - DNA, 17 bp, Homo sapiens
gcattacacccctgtgg

SEQ ID NO: 608 - DNA, 17 bp, Homo sapiens
cattacacccctgtggg

SEQ ID NO: 609 - DNA, 17 bp, Homo sapiens
attacacccctgtgggg

SEQ ID NO: 610 - DNA, 17 bp, Homo sapiens
ttacacccctgtgggga

SEQ ID NO: 611 - DNA, 17 bp, Homo sapiens
tacacccctgtggggag

SEQ ID NO: 612 - DNA, 17 bp, Homo sapiens
acacccctgtggggagc

SEQ ID NO: 613 - DNA, 17 bp, Homo sapiens
cacccctgtggggagcc

SEQ ID NO: 614 - DNA, 17 bp, Homo sapiens
acccctgtggggagccc

SEQ ID NO: 615 - DNA, 17 bp, Homo sapiens
cccctgtggggagcccg

SEQ ID NO: 616 - DNA, 17 bp, Homo sapiens
ccctgtggggagcccgg

SEQ ID NO: 617 - DNA, 17 bp, Homo sapiens
cctgtggggagcccggc

SEQ ID NO: 618 - DNA, 17 bp, Homo sapiens
ctgtggggagcccggcc

SEQ ID NO: 619 - DNA, 17 bp, Homo sapiens
tgtggggagcccggcca

SEQ ID NO: 620 - DNA, 17 bp, Homo sapiens
gtggggagcccggccaa

SEQ ID NO: 621 - DNA, 17 bp, Homo sapiens
tggggagcccggccaag

SEQ ID NO: 622 - DNA, 17 bp, Homo sapiens
ggggagcccggccaagg

SEQ ID NO: 623 - DNA, 17 bp, Homo sapiens
gggagcccggccaaggc

SEQ ID NO: 624 - DNA, 17 bp, Homo sapiens
ggagcccggccaaggcg

SEQ ID NO: 625 - DNA, 17 bp, Homo sapiens
gagcccggccaaggcgg

SEQ ID NO: 626 - DNA, 17 bp, Homo sapiens
agcccggccaaggcgga

SEQ ID NO: 627 - DNA, 17 bp, Homo sapiens
gcccggccaaggcggag

SEQ ID NO: 628 - DNA, 17 bp, Homo sapiens
cccggccaaggcggagc

SEQ ID NO: 629 - DNA, 17 bp, Homo sapiens
ccggccaaggcggagcg

SEQ ID NO: 630 - DNA, 17 bp, Homo sapiens
cggccaaggcggagcgg

SEQ ID NO: 631 - DNA, 17 bp, Homo sapiens
ggccaaggcggagcggc

SEQ ID NO: 632 - DNA, 17 bp, Homo sapiens
gccaaggcggagcggcg

SEQ ID NO: 633 - DNA, 17 bp, Homo sapiens
ccaaggcggagcggcgc

SEQ ID NO: 634 - DNA, 17 bp, Homo sapiens
caaggcggagcggcgct

SEQ ID NO: 635 - DNA, 17 bp, Homo sapiens
aaggcggagcggcgctt

SEQ ID NO: 636 - DNA, 17 bp, Homo sapiens
aggcggagcggcgcttc

SEQ ID NO: 637 - DNA, 17 bp, Homo sapiens
ggcggagcggcgcttcg

SEQ ID NO: 638 - DNA, 17 bp, Homo sapiens
gcggagcggcgcttcgt

SEQ ID NO: 639 - DNA, 17 bp, Homo sapiens
cggagcggcgcttcgtg

SEQ ID NO: 640 - DNA, 17 bp, Homo sapiens
ggagcggcgcttcgtgc

SEQ ID NO: 641 - DNA, 17 bp, Homo sapiens
gagcggcgcttcgtgca

SEQ ID NO: 642 - DNA, 17 bp, Homo sapiens
agcggcgcttcgtgcag

SEQ ID NO: 643 - DNA, 17 bp, Homo sapiens
gcggcgcttcgtgcagg

SEQ ID NO: 644 - DNA, 17 bp, Homo sapiens
cggcgcttcgtgcaggg

SEQ ID NO: 645 - DNA, 17 bp, Homo sapiens
ggcgcttcgtgcagggc

SEQ ID NO: 646 - DNA, 17 bp, Homo sapiens
gcgcttcgtgcagggcc

SEQ ID NO: 647 - DNA, 17 bp, Homo sapiens
cgcttcgtgcagggcca

SEQ ID NO: 648 - DNA, 17 bp, Homo sapiens
gcttcgtgcagggccat

SEQ ID NO: 649 - DNA, 17 bp, Homo sapiens
cttcgtgcagggccatt

SEQ ID NO: 650 - DNA, 17 bp, Homo sapiens
ttcgtgcagggccattt

SEQ ID NO: 651 - DNA, 17 bp, Homo sapiens
tcgtgcagggccatttc

SEQ ID NO: 652 - DNA, 17 bp, Homo sapiens
cgtgcagggccatttca

SEQ ID NO: 653 - DNA, 17 bp, Homo sapiens
gtgcagggccatttcac

SEQ ID NO: 654 - DNA, 17 bp, Homo sapiens
tgcagggccatttcacc

SEQ ID NO: 655 - DNA, 17 bp, Homo sapiens
gcagggccatttcacca

SEQ ID NO: 656 - DNA, 17 bp, Homo sapiens
cagggccatttcaccac

SEQ ID NO: 657 - DNA, 17 bp, Homo sapiens
agggccatttcaccacc

SEQ ID NO: 658 - DNA, 17 bp, Homo sapiens
gggccatttcaccacca

SEQ ID NO: 659 - DNA, 17 bp, Homo sapiens
ggccatttcaccaccaa

SEQ ID NO: 660 - DNA, 17 bp, Homo sapiens
gccatttcaccaccaac

SEQ ID NO: 661 - DNA, 17 bp, Homo sapiens
ccatttcaccaccaacg

SEQ ID NO: 662 - DNA, 17 bp, Homo sapiens
catttcaccaccaacga

SEQ ID NO: 663 - DNA, 17 bp, Homo sapiens
atttcaccaccaacgac

SEQ ID NO: 664 - DNA, 17 bp, Homo sapiens
tttcaccaccaacgact

SEQ ID NO: 665 - DNA, 17 bp, Homo sapiens
ttcaccaccaacgactc

SEQ ID NO: 666 - DNA, 17 bp, Homo sapiens
tcaccaccaacgactcc

SEQ ID NO: 667 - DNA, 17 bp, Homo sapiens
caccaccaacgactcct

SEQ ID NO: 668 - DNA, 17 bp, Homo sapiens
accaccaacgactccta

SEQ ID NO: 669 - DNA, 17 bp, Homo sapiens
ccaccaacgactcctac

SEQ ID NO: 670 - DNA, 17 bp, Homo sapiens
caccaacgactcctacc

SEQ ID NO: 671 - DNA, 17 bp, Homo sapiens
accaacgactcctaccg

SEQ ID NO: 672 - DNA, 17 bp, Homo sapiens
ccaacgactcctaccgc

SEQ ID NO: 673 - DNA, 17 bp, Homo sapiens
caacgactcctaccgct

SEQ ID NO: 674 - DNA, 17 bp, Homo sapiens
aacgactcctaccgctt

SEQ ID NO: 675 - DNA, 17 bp, Homo sapiens
acgactcctaccgcttc

SEQ ID NO: 676 - DNA, 17 bp, Homo sapiens
cgactcctaccgcttct

SEQ ID NO: 677 - DNA, 17 bp, Homo sapiens
gactcctaccgcttctc

SEQ ID NO: 678 - DNA, 17 bp, Homo sapiens
actcctaccgcttctcc

SEQ ID NO: 679 - DNA, 17 bp, Homo sapiens
ctcctaccgcttctccg

SEQ ID NO: 680 - DNA, 17 bp, Homo sapiens
tcctaccgcttctccgc

SEQ ID NO: 681 - DNA, 17 bp, Homo sapiens
cctaccgcttctccgcc

SEQ ID NO: 682 - DNA, 17 bp, Homo sapiens
ctaccgcttctccgcct

SEQ ID NO: 683 - DNA, 17 bp, Homo sapiens
taccgcttctccgcctc

SEQ ID NO: 684 - DNA, 17 bp, Homo sapiens
accgcttctccgcctcc

SEQ ID NO: 685 - DNA, 17 bp, Homo sapiens
ccgcttctccgcctcca

SEQ ID NO: 686 - DNA, 17 bp, Homo sapiens
cgcttctccgcctccag

SEQ ID NO: 687 - DNA, 17 bp, Homo sapiens
gcttctccgcctccagg

SEQ ID NO: 688 - DNA, 17 bp, Homo sapiens
cttctccgcctccagga

SEQ ID NO: 689 - DNA, 17 bp, Homo sapiens
ttctccgcctccaggag

SEQ ID NO: 690 - DNA, 17 bp, Homo sapiens
tctccgcctccaggagg

SEQ ID NO: 691 - DNA, 17 bp, Homo sapiens
ctccgcctccaggagga

SEQ ID NO: 692 - DNA, 17 bp, Homo sapiens
tccgcctccaggaggag

SEQ ID NO: 693 - DNA, 17 bp, Homo sapiens
ccgcctccaggaggagc

SEQ ID NO: 694 - DNA, 17 bp, Homo sapiens
cgcctccaggaggagca

SEQ ID NO: 695 - DNA, 17 bp, Homo sapiens
gcctccaggaggagcac

SEQ ID NO: 696 - DNA, 17 bp, Homo sapiens
cctccaggaggagcacc

SEQ ID NO: 697 - DNA, 17 bp, Homo sapiens
ctccaggaggagcaccg

SEQ ID NO: 698 - DNA, 17 bp, Homo sapiens
tccaggaggagcaccga

SEQ ID NO: 699 - DNA, 17 bp, Homo sapiens
ccaggaggagcaccgaa

SEQ ID NO: 700 - DNA, 17 bp, Homo sapiens
caggaggagcaccgaag

SEQ ID NO: 701 - DNA, 17 bp, Homo sapiens
aggaggagcaccgaagc

SEQ ID NO: 702 - DNA, 17 bp, Homo sapiens
ggaggagcaccgaagcc

SEQ ID NO: 703 - DNA, 17 bp, Homo sapiens
gaggagcaccgaagcca

SEQ ID NO: 704 - DNA, 17 bp, Homo sapiens
aggagcaccgaagccaa

SEQ ID NO: 705 - DNA, 17 bp, Homo sapiens
ggagcaccgaagccaat

SEQ ID NO: 706 - DNA, 17 bp, Homo sapiens
gagcaccgaagccaatt

SEQ ID NO: 707 - DNA, 17 bp, Homo sapiens
agcaccgaagccaattt

SEQ ID NO: 708 - DNA, 17 bp, Homo sapiens
gcaccgaagccaatttc

SEQ ID NO: 709 - DNA, 17 bp, Homo sapiens
caccgaagccaatttcg

SEQ ID NO: 710 - DNA, 17 bp, Homo sapiens
accgaagccaatttcgt

SEQ ID NO: 711 - DNA, 17 bp, Homo sapiens
ccgaagccaatttcgtc

SEQ ID NO: 712 - DNA, 17 bp, Homo sapiens
cgaagccaatttcgtct

SEQ ID NO: 713 - DNA, 17 bp, Homo sapiens
gaagccaatttcgtctc

SEQ ID NO: 714 - DNA, 17 bp, Homo sapiens
aagccaatttcgtctcg

SEQ ID NO: 715 - DNA, 17 bp, Homo sapiens
agccaatttcgtctcgc

SEQ ID NO: 716 - DNA, 17 bp, Homo sapiens
gccaatttcgtctcgct

SEQ ID NO: 717 - DNA, 17 bp, Homo sapiens
ccaatttcgtctcgctt

SEQ ID NO: 718 - DNA, 17 bp, Homo sapiens
caatttcgtctcgcttc

SEQ ID NO: 719 - DNA, 17 bp, Homo sapiens
aatttcgtctcgcttct

SEQ ID NO: 720 - DNA, 17 bp, Homo sapiens
atttcgtctcgcttctg

SEQ ID NO: 721 - DNA, 17 bp, Homo sapiens
tttcgtctcgcttctgg

SEQ ID NO: 722 - DNA, 17 bp, Homo sapiens
ttcgtctcgcttctggt

SEQ ID NO: 723 - DNA, 17 bp, Homo sapiens
tcgtctcgcttctggtg

SEQ ID NO: 724 - DNA, 17 bp, Homo sapiens
cgtctcgcttctggtgg

SEQ ID NO: 725 - DNA, 17 bp, Homo sapiens
gtctcgcttctggtggt

SEQ ID NO: 726 - DNA, 17 bp, Homo sapiens
tctcgcttctggtggtc

SEQ ID NO: 727 - DNA, 17 bp, Homo sapiens
ctcgcttctggtggtct

SEQ ID NO: 728 - DNA, 17 bp, Homo sapiens
tcgcttctggtggtctc

SEQ ID NO: 729 - DNA, 17 bp, Homo sapiens
cgcttctggtggtctcc

SEQ ID NO: 730 - DNA, 17 bp, Homo sapiens
gcttctggtggtctcct

SEQ ID NO: 731 - DNA, 17 bp, Homo sapiens
cttctggtggtctccta

SEQ ID NO: 732 - DNA, 17 bp, Homo sapiens
ttctggtggtctcctac

SEQ ID NO: 733 - DNA, 17 bp, Homo sapiens
tctggtggtctcctaca

SEQ ID NO: 734 - DNA, 17 bp, Homo sapiens
ctggtggtctcctacag

SEQ ID NO: 735 - DNA, 17 bp, Homo sapiens
tggtggtctcctacagc

SEQ ID NO: 736 - DNA, 17 bp, Homo sapiens
ggtggtctcctacagcg

SEQ ID NO: 737 - DNA, 17 bp, Homo sapiens
gtggtctcctacagcga

SEQ ID NO: 738 - DNA, 17 bp, Homo sapiens
tggtctcctacagcgac

SEQ ID NO: 739 - DNA, 17 bp, Homo sapiens
ggtctcctacagcgact

SEQ ID NO: 740 - DNA, 17 bp, Homo sapiens
gtctcctacagcgactc

SEQ ID NO: 741 - DNA, 17 bp, Homo sapiens
tctcctacagcgactca

SEQ ID NO: 742 - DNA, 17 bp, Homo sapiens
ctcctacagcgactcac

SEQ ID NO: 743 - DNA, 17 bp, Homo sapiens
tcctacagcgactcact

SEQ ID NO: 744 - DNA, 17 bp, Homo sapiens
cctacagcgactcactg

SEQ ID NO: 745 - DNA, 17 bp, Homo sapiens
ctacagcgactcactgc

SEQ ID NO: 746 - DNA, 17 bp, Homo sapiens
tacagcgactcactgct

SEQ ID NO: 747 - DNA, 17 bp, Homo sapiens
acagcgactcactgctg

SEQ ID NO: 748 - DNA, 17 bp, Homo sapiens
cagcgactcactgctgg

SEQ ID NO: 749 - DNA, 17 bp, Homo sapiens
agcgactcactgctgga

SEQ ID NO: 750 - DNA, 17 bp, Homo sapiens
gcgactcactgctggac

SEQ ID NO: 751 - DNA, 17 bp, Homo sapiens
cgactcactgctggacc

SEQ ID NO: 752 - DNA, 17 bp, Homo sapiens
gactcactgctggaccc

SEQ ID NO: 753 - DNA, 17 bp, Homo sapiens
actcactgctggaccca

SEQ ID NO: 754 - DNA, 17 bp, Homo sapiens
ctcactgctggacccag

SEQ ID NO: 755 - DNA, 17 bp, Homo sapiens
tcactgctggacccagc

SEQ ID NO: 756 - DNA, 17 bp, Homo sapiens
cactgctggacccagct

SEQ ID NO: 757 - DNA, 17 bp, Homo sapiens
actgctggacccagcta

SEQ ID NO: 758 - DNA, 17 bp, Homo sapiens
ctgctggacccagctac

SEQ ID NO: 759 - DNA, 17 bp, Homo sapiens
tgctggacccagctacc

SEQ ID NO: 760 - DNA, 17 bp, Homo sapiens
gctggacccagctacct

SEQ ID NO: 761 - DNA, 17 bp, Homo sapiens
ctggacccagctacctt

SEQ ID NO: 762 - DNA, 17 bp, Homo sapiens
tggacccagctaccttt

SEQ ID NO: 763 - DNA, 17 bp, Homo sapiens
ggacccagctacctttg

SEQ ID NO: 764 - DNA, 17 bp, Homo sapiens
gacccagctacctttgc

SEQ ID NO: 765 - DNA, 17 bp, Homo sapiens
acccagctacctttgca

SEQ ID NO: 766 - DNA, 17 bp, Homo sapiens
cccagctacctttgcag

SEQ ID NO: 767 - DNA, 17 bp, Homo sapiens
ccagctacctttgcaga

SEQ ID NO: 768 - DNA, 17 bp, Homo sapiens
cagctacctttgcagaa

SEQ ID NO: 769 - DNA, 17 bp, Homo sapiens
agctacctttgcagaag

SEQ ID NO: 770 - DNA, 17 bp, Homo sapiens
gctacctttgcagaagt

SEQ ID NO: 771 - DNA, 17 bp, Homo sapiens
ctacctttgcagaagtc

SEQ ID NO: 772 - DNA, 17 bp, Homo sapiens
tacctttgcagaagtca

SEQ ID NO: 773 - DNA, 17 bp, Homo sapiens
acctttgcagaagtcag

SEQ ID NO: 774 - DNA, 17 bp, Homo sapiens
cctttgcagaagtcagc

SEQ ID NO: 775 - DNA, 17 bp, Homo sapiens
ctttgcagaagtcagca

SEQ ID NO: 776 - DNA, 17 bp, Homo sapiens
tttgcagaagtcagcaa

SEQ ID NO: 777 - DNA, 17 bp, Homo sapiens
ttgcagaagtcagcaaa

SEQ ID NO: 778 - DNA, 17 bp, Homo sapiens
tgcagaagtcagcaaac

SEQ ID NO: 779 - DNA, 17 bp, Homo sapiens
gcagaagtcagcaaact

SEQ ID NO: 780 - DNA, 17 bp, Homo sapiens
cagaagtcagcaaactg

SEQ ID NO: 781 - DNA, 17 bp, Homo sapiens
agaagtcagcaaactgg

SEQ ID NO: 782 - DNA, 17 bp, Homo sapiens
gaagtcagcaaactgga

SEQ ID NO: 783 - DNA, 17 bp, Homo sapiens
aagtcagcaaactggac

SEQ ID NO: 784 - DNA, 17 bp, Homo sapiens
agtcagcaaactggacg

SEQ ID NO: 785 - DNA, 17 bp, Homo sapiens
gtcagcaaactggacgg

SEQ ID NO: 786 - DNA, 17 bp, Homo sapiens
tcagcaaactggacggc

SEQ ID NO: 787 - DNA, 17 bp, Homo sapiens
cagcaaactggacggcg

SEQ ID NO: 788 - DNA, 17 bp, Homo sapiens
agcaaactggacggcgc

SEQ ID NO: 789 - DNA, 17 bp, Homo sapiens
gcaaactggacggcgcg

SEQ ID NO: 790 - DNA, 17 bp, Homo sapiens
caaactggacggcgcgg

SEQ ID NO: 791 - DNA, 17 bp, Homo sapiens
aaactggacggcgcggt

SEQ ID NO: 792 - DNA, 17 bp, Homo sapiens
aactggacggcgcggtg

SEQ ID NO: 793 - DNA, 17 bp, Homo sapiens
actggacggcgcggtgc

SEQ ID NO: 794 - DNA, 17 bp, Homo sapiens
ctggacggcgcggtgca

SEQ ID NO: 795 - DNA, 17 bp, Homo sapiens
tggacggcgcggtgcag

SEQ ID NO: 796 - DNA, 17 bp, Homo sapiens
ggacggcgcggtgcagg

SEQ ID NO: 797 - DNA, 17 bp, Homo sapiens
gacggcgcggtgcagga

SEQ ID NO: 798 - DNA, 17 bp, Homo sapiens
acggcgcggtgcaggat

SEQ ID NO: 799 - DNA, 17 bp, Homo sapiens
cggcgcggtgcaggatc

SEQ ID NO: 800 - DNA, 17 bp, Homo sapiens
ggcgcggtgcaggatct

SEQ ID NO: 801 - DNA, 17 bp, Homo sapiens
gcgcggtgcaggatctg

SEQ ID NO: 802 - DNA, 17 bp, Homo sapiens
cgcggtgcaggatctgc

SEQ ID NO: 803 - DNA, 17 bp, Homo sapiens
gcggtgcaggatctgcg

SEQ ID NO: 804 - DNA, 17 bp, Homo sapiens
cggtgcaggatctgcgc

SEQ ID NO: 805 - DNA, 17 bp, Homo sapiens
ggtgcaggatctgcgcg

SEQ ID NO: 806 - DNA, 17 bp, Homo sapiens
gtgcaggatctgcgcgt

SEQ ID NO: 807 - DNA, 17 bp, Homo sapiens
tgcaggatctgcgcgtg

SEQ ID NO: 808 - DNA, 17 bp, Homo sapiens
gcaggatctgcgcgtgg

SEQ ID NO: 809 - DNA, 17 bp, Homo sapiens
caggatctgcgcgtggc

SEQ ID NO: 810 - DNA, 17 bp, Homo sapiens
aggatctgcgcgtggcg

SEQ ID NO: 811 - DNA, 17 bp, Homo sapiens
ggatctgcgcgtggcgc

SEQ ID NO: 812 - DNA, 17 bp, Homo sapiens
gatctgcgcgtggcgcg

SEQ ID NO: 813 - DNA, 17 bp, Homo sapiens
atctgcgcgtggcgcgg

SEQ ID NO: 814 - DNA, 17 bp, Homo sapiens
tctgcgcgtggcgcggg

SEQ ID NO: 815 - DNA, 17 bp, Homo sapiens
ctgcgcgtggcgcggga

SEQ ID NO: 816 - DNA, 17 bp, Homo sapiens
tgcgcgtggcgcgggaa

SEQ ID NO: 817 - DNA, 17 bp, Homo sapiens
gcgcgtggcgcgggaaa

SEQ ID NO: 818 - DNA, 17 bp, Homo sapiens
cgcgtggcgcgggaaaa

SEQ ID NO: 819 - DNA, 17 bp, Homo sapiens
gcgtggcgcgggaaaag

SEQ ID NO: 820 - DNA, 17 bp, Homo sapiens
cgtggcgcgggaaaagg

SEQ ID NO: 821 - DNA, 17 bp, Homo sapiens
gtggcgcgggaaaaggg

SEQ ID NO: 822 - DNA, 17 bp, Homo sapiens
tggcgcgggaaaaggga

SEQ ID NO: 823 - DNA, 17 bp, Homo sapiens
ggcgcgggaaaagggaa

SEQ ID NO: 824 - DNA, 17 bp, Homo sapiens
gcgcgggaaaagggaag

SEQ ID NO: 825 - DNA, 17 bp, Homo sapiens
cgcgggaaaagggaagc

SEQ ID NO: 826 - DNA, 17 bp, Homo sapiens
gcgggaaaagggaagcc

SEQ ID NO: 827 - DNA, 17 bp, Homo sapiens
cgggaaaagggaagcca

SEQ ID NO: 828 - DNA, 17 bp, Homo sapiens
gggaaaagggaagccag

SEQ ID NO: 829 - DNA, 17 bp, Homo sapiens
ggaaaagggaagccaga

SEQ ID NO: 830 - DNA, 17 bp, Homo sapiens
gaaaagggaagccagat

SEQ ID NO: 831 - DNA, 17 bp, Homo sapiens
aaaagggaagccagatc

SEQ ID NO: 832 - DNA, 17 bp, Homo sapiens
aaagggaagccagatcc

SEQ ID NO: 833 - DNA, 17 bp, Homo sapiens
aagggaagccagatcca

SEQ ID NO: 834 - DNA, 17 bp, Homo sapiens
agggaagccagatccag

SEQ ID NO: 835 - DNA, 17 bp, Homo sapiens
gggaagccagatccagt

SEQ ID NO: 836 - DNA, 17 bp, Homo sapiens
ggaagccagatccagta

SEQ ID NO: 837 - DNA, 17 bp, Homo sapiens
gaagccagatccagtac

SEQ ID NO: 838 - DNA, 17 bp, Homo sapiens
aagccagatccagtacc

SEQ ID NO: 839 - DNA, 17 bp, Homo sapiens
agccagatccagtacca

SEQ ID NO: 840 - DNA, 17 bp, Homo sapiens
gccagatccagtaccag

SEQ ID NO: 841 - DNA, 17 bp, Homo sapiens
ccagatccagtaccagc

SEQ ID NO: 842 - DNA, 17 bp, Homo sapiens
cagatccagtaccagca

SEQ ID NO: 843 - DNA, 17 bp, Homo sapiens
agatccagtaccagcag

SEQ ID NO: 844 - DNA, 17 bp, Homo sapiens
gatccagtaccagcagg

SEQ ID NO: 845 - DNA, 17 bp, Homo sapiens
atccagtaccagcaggt

SEQ ID NO: 846 - DNA, 17 bp, Homo sapiens
tccagtaccagcaggtg

SEQ ID NO: 847 - DNA, 17 bp, Homo sapiens
ccagtaccagcaggtgt

SEQ ID NO: 848 - DNA, 17 bp, Homo sapiens
cagtaccagcaggtgtg

SEQ ID NO: 849 - DNA, 17 bp, Homo sapiens
agtaccagcaggtgtgc

SEQ ID NO: 850 - DNA, 17 bp, Homo sapiens
gtaccagcaggtgtgcg

SEQ ID NO: 851 - DNA, 17 bp, Homo sapiens
taccagcaggtgtgcgc

SEQ ID NO: 852 - DNA, 17 bp, Homo sapiens
accagcaggtgtgcgcg

SEQ ID NO: 853 - DNA, 17 bp, Homo sapiens
ccagcaggtgtgcgcga

SEQ ID NO: 854 - DNA, 17 bp, Homo sapiens
cagcaggtgtgcgcgag

SEQ ID NO: 855 - DNA, 17 bp, Homo sapiens
agcaggtgtgcgcgagg

SEQ ID NO: 856 - DNA, 17 bp, Homo sapiens
gcaggtgtgcgcgaggt

SEQ ID NO: 857 - DNA, 17 bp, Homo sapiens
caggtgtgcgcgaggta

SEQ ID NO: 858 - DNA, 17 bp, Homo sapiens
aggtgtgcgcgaggtac

SEQ ID NO: 859 - DNA, 17 bp, Homo sapiens
ggtgtgcgcgaggtaca

SEQ ID NO: 860 - DNA, 17 bp, Homo sapiens
gtgtgcgcgaggtacag

SEQ ID NO: 861 - DNA, 17 bp, Homo sapiens
tgtgcgcgaggtacagg

SEQ ID NO: 862 - DNA, 17 bp, Homo sapiens
gtgcgcgaggtacaggg

SEQ ID NO: 863 - DNA, 17 bp, Homo sapiens
tgcgcgaggtacagggc

SEQ ID NO: 864 - DNA, 17 bp, Homo sapiens
gcgcgaggtacagggcg

SEQ ID NO: 865 - DNA, 17 bp, Homo sapiens
cgcgaggtacagggcgc

SEQ ID NO: 866 - DNA, 17 bp, Homo sapiens
gcgaggtacagggcgct

SEQ ID NO: 867 - DNA, 17 bp, Homo sapiens
cgaggtacagggcgctc

SEQ ID NO: 868 - DNA, 17 bp, Homo sapiens
gaggtacagggcgctct

SEQ ID NO: 869 - DNA, 17 bp, Homo sapiens
aggtacagggcgctctg

SEQ ID NO: 870 - DNA, 17 bp, Homo sapiens
ggtacagggcgctctgc

SEQ ID NO: 871 - DNA, 17 bp, Homo sapiens
gtacagggcgctctgcg

SEQ ID NO: 872 - DNA, 17 bp, Homo sapiens
tacagggcgctctgcgt

SEQ ID NO: 873 - DNA, 17 bp, Homo sapiens
acagggcgctctgcgtg

SEQ ID NO: 874 - DNA, 17 bp, Homo sapiens
cagggcgctctgcgtgc

SEQ ID NO: 875 - DNA, 17 bp, Homo sapiens
agggcgctctgcgtgcc

SEQ ID NO: 876 - DNA, 17 bp, Homo sapiens
gggcgctctgcgtgccc

SEQ ID NO: 877 - DNA, 17 bp, Homo sapiens
ggcgctctgcgtgcccc

SEQ ID NO: 878 - DNA, 17 bp, Homo sapiens
gcgctctgcgtgccccc

SEQ ID NO: 879 - DNA, 17 bp, Homo sapiens
cgctctgcgtgcccccc

SEQ ID NO: 880 - DNA, 17 bp, Homo sapiens
gctctgcgtgcccccca

SEQ ID NO: 881 - DNA, 17 bp, Homo sapiens
ctctgcgtgccccccaa

SEQ ID NO: 882 - DNA, 17 bp, Homo sapiens
tctgcgtgccccccaac

SEQ ID NO: 883 - DNA, 17 bp, Homo sapiens
ctgcgtgccccccaacc

SEQ ID NO: 884 - DNA, 17 bp, Homo sapiens
tgcgtgccccccaaccc

SEQ ID NO: 885 - DNA, 17 bp, Homo sapiens
gcgtgccccccaacccg

SEQ ID NO: 886 - DNA, 17 bp, Homo sapiens
cgtgccccccaacccga

SEQ ID NO: 887 - DNA, 17 bp, Homo sapiens
gtgccccccaacccgat

SEQ ID NO: 888 - DNA, 17 bp, Homo sapiens
tgccccccaacccgatc

SEQ ID NO: 889 - DNA, 17 bp, Homo sapiens
gccccccaacccgatcc

SEQ ID NO: 890 - DNA, 17 bp, Homo sapiens
ccccccaacccgatcct

SEQ ID NO: 891 - DNA, 17 bp, Homo sapiens
cccccaacccgatcctg

SEQ ID NO: 892 - DNA, 17 bp, Homo sapiens
ccccaacccgatcctgt

SEQ ID NO: 893 - DNA, 17 bp, Homo sapiens
cccaacccgatcctgta

SEQ ID NO: 894 - DNA, 17 bp, Homo sapiens
ccaacccgatcctgtac

SEQ ID NO: 895 - DNA, 17 bp, Homo sapiens
caacccgatcctgtacg

SEQ ID NO: 896 - DNA, 17 bp, Homo sapiens
aacccgatcctgtacgc

SEQ ID NO: 897 - DNA, 17 bp, Homo sapiens
acccgatcctgtacgcc

SEQ ID NO: 898 - DNA, 17 bp, Homo sapiens
cccgatcctgtacgcct

SEQ ID NO: 899 - DNA, 17 bp, Homo sapiens
ccgatcctgtacgcctg

SEQ ID NO: 900 - DNA, 17 bp, Homo sapiens
cgatcctgtacgcctgg

SEQ ID NO: 901 - DNA, 17 bp, Homo sapiens
gatcctgtacgcctggc

SEQ ID NO: 902 - DNA, 17 bp, Homo sapiens
atcctgtacgcctggca

SEQ ID NO: 903 - DNA, 17 bp, Homo sapiens
tcctgtacgcctggcag

SEQ ID NO: 904 - DNA, 17 bp, Homo sapiens
cctgtacgcctggcagg

SEQ ID NO: 905 - DNA, 17 bp, Homo sapiens
ctgtacgcctggcaggt

SEQ ID NO: 906 - DNA, 17 bp, Homo sapiens
tgtacgcctggcaggtg

SEQ ID NO: 907 - DNA, 17 bp, Homo sapiens
gtacgcctggcaggtga

SEQ ID NO: 908 - DNA, 17 bp, Homo sapiens
tacgcctggcaggtgaa

SEQ ID NO: 909 - DNA, 17 bp, Homo sapiens
acgcctggcaggtgaac

SEQ ID NO: 910 - DNA, 17 bp, Homo sapiens
cgcctggcaggtgaaca

SEQ ID NO: 911 - DNA, 17 bp, Homo sapiens
gcctggcaggtgaacaa

SEQ ID NO: 912 - DNA, 17 bp, Homo sapiens
cctggcaggtgaacaaa

SEQ ID NO: 913 - DNA, 17 bp, Homo sapiens
ctggcaggtgaacaaaa

SEQ ID NO: 914 - DNA, 17 bp, Homo sapiens
tggcaggtgaacaaaac

SEQ ID NO: 915 - DNA, 17 bp, Homo sapiens
ggcaggtgaacaaaacg

SEQ ID NO: 916 - DNA, 17 bp, Homo sapiens
gcaggtgaacaaaacgc

SEQ ID NO: 917 - DNA, 17 bp, Homo sapiens
caggtgaacaaaacgct

SEQ ID NO: 918 - DNA, 17 bp, Homo sapiens
aggtgaacaaaacgctc

SEQ ID NO: 919 - DNA, 17 bp, Homo sapiens
ggtgaacaaaacgctca

SEQ ID NO: 920 - DNA, 17 bp, Homo sapiens
gtgaacaaaacgctcaa

SEQ ID NO: 921 - DNA, 17 bp, Homo sapiens
tgaacaaaacgctcaac

SEQ ID NO: 922 - DNA, 17 bp, Homo sapiens
gaacaaaacgctcaacc

SEQ ID NO: 923 - DNA, 17 bp, Homo sapiens
aacaaaacgctcaacct

SEQ ID NO: 924 - DNA, 17 bp, Homo sapiens
acaaaacgctcaacctg

SEQ ID NO: 925 - DNA, 17 bp, Homo sapiens
caaaacgctcaacctga

SEQ ID NO: 926 - DNA, 17 bp, Homo sapiens
aaaacgctcaacctgag

SEQ ID NO: 927 - DNA, 17 bp, Homo sapiens
aaacgctcaacctgagc

SEQ ID NO: 928 - DNA, 17 bp, Homo sapiens
aacgctcaacctgagca

SEQ ID NO: 929 - DNA, 17 bp, Homo sapiens
acgctcaacctgagcag

SEQ ID NO: 930 - DNA, 17 bp, Homo sapiens
cgctcaacctgagcagc

SEQ ID NO: 931 - DNA, 17 bp, Homo sapiens
gctcaacctgagcagca

SEQ ID NO: 932 - DNA, 17 bp, Homo sapiens
ctcaacctgagcagcat

SEQ ID NO: 933 - DNA, 17 bp, Homo sapiens
tcaacctgagcagcatc

SEQ ID NO: 934 - DNA, 17 bp, Homo sapiens
caacctgagcagcatct

SEQ ID NO: 935 - DNA, 17 bp, Homo sapiens
aacctgagcagcatctc

SEQ ID NO: 936 - DNA, 17 bp, Homo sapiens
acctgagcagcatctcc

SEQ ID NO: 937 - DNA, 17 bp, Homo sapiens
cctgagcagcatctcct

SEQ ID NO: 938 - DNA, 17 bp, Homo sapiens
ctgagcagcatctcctt

SEQ ID NO: 939 - DNA, 17 bp, Homo sapiens
tgagcagcatctccttc

SEQ ID NO: 940 - DNA, 17 bp, Homo sapiens
gagcagcatctccttcc

SEQ ID NO: 941 - DNA, 17 bp, Homo sapiens
agcagcatctccttccc

SEQ ID NO: 942 - DNA, 17 bp, Homo sapiens
gcagcatctccttcccc

SEQ ID NO: 943 - DNA, 17 bp, Homo sapiens
cagcatctccttccccg

SEQ ID NO: 944 - DNA, 17 bp, Homo sapiens
agcatctccttccccgc

SEQ ID NO: 945 - DNA, 17 bp, Homo sapiens
gcatctccttccccgcc

SEQ ID NO: 946 - DNA, 17 bp, Homo sapiens
catctccttccccgcct

SEQ ID NO: 947 - DNA, 17 bp, Homo sapiens
atctccttccccgccta

SEQ ID NO: 948 - DNA, 17 bp, Homo sapiens
tctccttccccgcctac

SEQ ID NO: 949 - DNA, 17 bp, Homo sapiens
ctccttccccgcctaca

SEQ ID NO: 950 - DNA, 17 bp, Homo sapiens
tccttccccgcctacaa

SEQ ID NO: 951 - DNA, 17 bp, Homo sapiens
ccttccccgcctacaac

SEQ ID NO: 952 - DNA, 17 bp, Homo sapiens
cttccccgcctacaacc

SEQ ID NO: 953 - DNA, 17 bp, Homo sapiens
ttccccgcctacaacca

SEQ ID NO: 954 - DNA, 17 bp, Homo sapiens
tccccgcctacaaccac

SEQ ID NO: 955 - DNA, 17 bp, Homo sapiens
ccccgcctacaaccacg

SEQ ID NO: 956 - DNA, 17 bp, Homo sapiens
cccgcctacaaccacgg

SEQ ID NO: 957 - DNA, 17 bp, Homo sapiens
ccgcctacaaccacggc

SEQ ID NO: 958 - DNA, 17 bp, Homo sapiens
cgcctacaaccacggca

SEQ ID NO: 959 - DNA, 17 bp, Homo sapiens
gcctacaaccacggcag

SEQ ID NO: 960 - DNA, 17 bp, Homo sapiens
cctacaaccacggcagg

SEQ ID NO: 961 - DNA, 17 bp, Homo sapiens
ctacaaccacggcaggc

SEQ ID NO: 962 - DNA, 17 bp, Homo sapiens
tacaaccacggcaggca

SEQ ID NO: 963 - DNA, 17 bp, Homo sapiens
acaaccacggcaggcat

SEQ ID NO: 964 - DNA, 17 bp, Homo sapiens
caaccacggcaggcatc

SEQ ID NO: 965 - DNA, 17 bp, Homo sapiens
aaccacggcaggcatcc

SEQ ID NO: 966 - DNA, 17 bp, Homo sapiens
accacggcaggcatccc

SEQ ID NO: 967 - DNA, 17 bp, Homo sapiens
ccacggcaggcatcccc

SEQ ID NO: 968 - DNA, 17 bp, Homo sapiens
cacggcaggcatcccct

SEQ ID NO: 969 - DNA, 17 bp, Homo sapiens
acggcaggcatcccctc

SEQ ID NO: 970 - DNA, 17 bp, Homo sapiens
cggcaggcatcccctct

SEQ ID NO: 971 - DNA, 17 bp, Homo sapiens
ggcaggcatcccctcta

SEQ ID NO: 972 - DNA, 17 bp, Homo sapiens
gcaggcatcccctctac

SEQ ID NO: 973 - DNA, 17 bp, Homo sapiens
caggcatcccctctacc

SEQ ID NO: 974 - DNA, 17 bp, Homo sapiens
aggcatcccctctacct

SEQ ID NO: 975 - DNA, 17 bp, Homo sapiens
ggcatcccctctacctg

SEQ ID NO: 976 - DNA, 17 bp, Homo sapiens
gcatcccctctacctga

SEQ ID NO: 977 - DNA, 17 bp, Homo sapiens
catcccctctacctgac

SEQ ID NO: 978 - DNA, 17 bp, Homo sapiens
atcccctctacctgacc

SEQ ID NO: 979 - DNA, 17 bp, Homo sapiens
tcccctctacctgaccg

SEQ ID NO: 980 - DNA, 17 bp, Homo sapiens
cccctctacctgaccgg

SEQ ID NO: 981 - DNA, 17 bp, Homo sapiens
ccctctacctgaccggc

SEQ ID NO: 982 - DNA, 17 bp, Homo sapiens
cctctacctgaccggct

SEQ ID NO: 983 - DNA, 17 bp, Homo sapiens
ctctacctgaccggctt

SEQ ID NO: 984 - DNA, 17 bp, Homo sapiens
tctacctgaccggcttc

SEQ ID NO: 985 - DNA, 17 bp, Homo sapiens
ctacctgaccggcttct

SEQ ID NO: 986 - DNA, 17 bp, Homo sapiens
tacctgaccggcttctt

SEQ ID NO: 987 - DNA, 17 bp, Homo sapiens
acctgaccggcttcttc

SEQ ID NO: 988 - DNA, 17 bp, Homo sapiens
cctgaccggcttcttcg

SEQ ID NO: 989 - DNA, 17 bp, Homo sapiens
ctgaccggcttcttcgg

SEQ ID NO: 990 - DNA, 17 bp, Homo sapiens
tgaccggcttcttcgga

SEQ ID NO: 991 - DNA, 17 bp, Homo sapiens
gaccggcttcttcggag

SEQ ID NO: 992 - DNA, 17 bp, Homo sapiens
accggcttcttcggagg

SEQ ID NO: 993 - DNA, 17 bp, Homo sapiens
ccggcttcttcggagga

SEQ ID NO: 994 - DNA, 17 bp, Homo sapiens
cggcttcttcggaggat

SEQ ID NO: 995 - DNA, 17 bp, Homo sapiens
ggcttcttcggaggata

SEQ ID NO: 996 - DNA, 17 bp, Homo sapiens
gcttcttcggaggatac

SEQ ID NO: 997 - DNA, 17 bp, Homo sapiens
cttcttcggaggataca

SEQ ID NO: 998 - DNA, 17 bp, Homo sapiens
ttcttcggaggatacat

SEQ ID NO: 999 - DNA, 17 bp, Homo sapiens
tcttcggaggatacatc

SEQ ID NO: 1000 - DNA, 17 bp, Homo sapiens
cttcggaggatacatct

SEQ ID NO: 1001 - DNA, 17 bp, Homo sapiens
ttcggaggatacatctt

SEQ ID NO: 1002 - DNA, 17 bp, Homo sapiens
tcggaggatacatcttg

SEQ ID NO: 1003 - DNA, 17 bp, Homo sapiens
cggaggatacatcttgg

SEQ ID NO: 1004 - DNA, 17 bp, Homo sapiens
ggaggatacatcttggg

SEQ ID NO: 1005 - DNA, 17 bp, Homo sapiens
gaggatacatcttgggg

SEQ ID NO: 1006 - DNA, 17 bp, Homo sapiens
aggatacatcttggggg

SEQ ID NO: 1007 - DNA, 17 bp, Homo sapiens
ggatacatcttgggggg

SEQ ID NO: 1008 - DNA, 17 bp, Homo sapiens
gatacatcttggggggc

SEQ ID NO: 1009 - DNA, 17 bp, Homo sapiens
atacatcttggggggca

SEQ ID NO: 1010 - DNA, 17 bp, Homo sapiens
tacatcttggggggcag

SEQ ID NO: 1011 - DNA, 17 bp, Homo sapiens
acatcttggggggcagc

SEQ ID NO: 1012 - DNA, 17 bp, Homo sapiens
catcttggggggcagcc

SEQ ID NO: 1013 - DNA, 17 bp, Homo sapiens
atcttggggggcagcct

SEQ ID NO: 1014 - DNA, 17 bp, Homo sapiens
tcttggggggcagccta

SEQ ID NO: 1015 - DNA, 17 bp, Homo sapiens
cttggggggcagcctag

SEQ ID NO: 1016 - DNA, 17 bp, Homo sapiens
ttggggggcagcctagg

SEQ ID NO: 1017 - DNA, 17 bp, Homo sapiens
tggggggcagcctagga

SEQ ID NO: 1018 - DNA, 17 bp, Homo sapiens
ggggggcagcctaggaa

SEQ ID NO: 1019 - DNA, 17 bp, Homo sapiens
gggggcagcctaggaat

SEQ ID NO: 1020 - DNA, 17 bp, Homo sapiens
ggggcagcctaggaatg

SEQ ID NO: 1021 - DNA, 17 bp, Homo sapiens
gggcagcctaggaatgg

SEQ ID NO: 1022 - DNA, 17 bp, Homo sapiens
ggcagcctaggaatggg

SEQ ID NO: 1023 - DNA, 17 bp, Homo sapiens
gcagcctaggaatgggc

SEQ ID NO: 1024 - DNA, 17 bp, Homo sapiens
cagcctaggaatgggcc

SEQ ID NO: 1025 - DNA, 17 bp, Homo sapiens
agcctaggaatgggcca

SEQ ID NO: 1026 - DNA, 17 bp, Homo sapiens
gcctaggaatgggccag

SEQ ID NO: 1027 - DNA, 17 bp, Homo sapiens
cctaggaatgggccagt

SEQ ID NO: 1028 - DNA, 17 bp, Homo sapiens
ctaggaatgggccagtt

SEQ ID NO: 1029 - DNA, 17 bp, Homo sapiens
taggaatgggccagtta

SEQ ID NO: 1030 - DNA, 17 bp, Homo sapiens
aggaatgggccagttac

SEQ ID NO: 1031 - DNA, 17 bp, Homo sapiens
ggaatgggccagttact

SEQ ID NO: 1032 - DNA, 17 bp, Homo sapiens
gaatgggccagttactc

SEQ ID NO: 1033 - DNA, 17 bp, Homo sapiens
aatgggccagttactcc

SEQ ID NO: 1034 - DNA, 17 bp, Homo sapiens
atgggccagttactcct

SEQ ID NO: 1035 - DNA, 17 bp, Homo sapiens
tgggccagttactcctg

SEQ ID NO: 1036 - DNA, 17 bp, Homo sapiens
gggccagttactcctgc

SEQ ID NO: 1037 - DNA, 17 bp, Homo sapiens
ggccagttactcctgcg

SEQ ID NO: 1038 - DNA, 17 bp, Homo sapiens
gccagttactcctgcgg

SEQ ID NO: 1039 - DNA, 17 bp, Homo sapiens
ccagttactcctgcggg

SEQ ID NO: 1040 - DNA, 17 bp, Homo sapiens
cagttactcctgcgggc

SEQ ID NO: 1041 - DNA, 17 bp, Homo sapiens
agttactcctgcgggcc

SEQ ID NO: 1042 - DNA, 17 bp, Homo sapiens
gttactcctgcgggcca

SEQ ID NO: 1043 - DNA, 17 bp, Homo sapiens
ttactcctgcgggccaa

SEQ ID NO: 1044 - DNA, 17 bp, Homo sapiens
tactcctgcgggccaaa

SEQ ID NO: 1045 - DNA, 17 bp, Homo sapiens
actcctgcgggccaaag

SEQ ID NO: 1046 - DNA, 17 bp, Homo sapiens
ctcctgcgggccaaagc

SEQ ID NO: 1047 - DNA, 17 bp, Homo sapiens
tcctgcgggccaaagcc

SEQ ID NO: 1048 - DNA, 17 bp, Homo sapiens
cctgcgggccaaagcca

SEQ ID NO: 1049 - DNA, 17 bp, Homo sapiens
ctgcgggccaaagccat

SEQ ID NO: 1050 - DNA, 17 bp, Homo sapiens
tgcgggccaaagccatg

SEQ ID NO: 1051 - DNA, 17 bp, Homo sapiens
gcgggccaaagccatgc

SEQ ID NO: 1052 - DNA, 17 bp, Homo sapiens
cgggccaaagccatgcg

SEQ ID NO: 1053 - DNA, 17 bp, Homo sapiens
gggccaaagccatgcgg

SEQ ID NO: 1054 - DNA, 17 bp, Homo sapiens
ggccaaagccatgcggc

SEQ ID NO: 1055 - DNA, 17 bp, Homo sapiens
gccaaagccatgcggct

SEQ ID NO: 1056 - DNA, 17 bp, Homo sapiens
ccaaagccatgcggctg

SEQ ID NO: 1057 - DNA, 17 bp, Homo sapiens
caaagccatgcggctgc

SEQ ID NO: 1058 - DNA, 17 bp, Homo sapiens
aaagccatgcggctgct

SEQ ID NO: 1059 - DNA, 17 bp, Homo sapiens
aagccatgcggctgctg

SEQ ID NO: 1060 - DNA, 17 bp, Homo sapiens
agccatgcggctgctgt

SEQ ID NO: 1061 - DNA, 17 bp, Homo sapiens
gccatgcggctgctgta

SEQ ID NO: 1062 - DNA, 17 bp, Homo sapiens
ccatgcggctgctgtac

SEQ ID NO: 1063 - DNA, 17 bp, Homo sapiens
catgcggctgctgtact

SEQ ID NO: 1064 - DNA, 17 bp, Homo sapiens
atgcggctgctgtacta

SEQ ID NO: 1065 - DNA, 17 bp, Homo sapiens
tgcggctgctgtactac

SEQ ID NO: 1066 - DNA, 17 bp, Homo sapiens
gcggctgctgtactacc

SEQ ID NO: 1067 - DNA, 17 bp, Homo sapiens
cggctgctgtactacct

SEQ ID NO: 1068 - DNA, 17 bp, Homo sapiens
ggctgctgtactacctg

SEQ ID NO: 1069 - DNA, 17 bp, Homo sapiens
gctgctgtactacctga

SEQ ID NO: 1070 - DNA, 17 bp, Homo sapiens
ctgctgtactacctgaa

SEQ ID NO: 1071 - DNA, 17 bp, Homo sapiens
tgctgtactacctgaag

SEQ ID NO: 1072 - DNA, 17 bp, Homo sapiens
gctgtactacctgaaga

SEQ ID NO: 1073 - DNA, 17 bp, Homo sapiens
ctgtactacctgaagac

SEQ ID NO: 1074 - DNA, 17 bp, Homo sapiens
tgtactacctgaagacc

SEQ ID NO: 1075 - DNA, 17 bp, Homo sapiens
gtactacctgaagaccg

SEQ ID NO: 1076 - DNA, 17 bp, Homo sapiens
tactacctgaagaccga

SEQ ID NO: 1077 - DNA, 17 bp, Homo sapiens
actacctgaagaccgag

SEQ ID NO: 1078 - DNA, 17 bp, Homo sapiens
ctacctgaagaccgagg

SEQ ID NO: 1079 - DNA, 17 bp, Homo sapiens
tacctgaagaccgagga

SEQ ID NO: 1080 - DNA, 17 bp, Homo sapiens
acctgaagaccgaggac

SEQ ID NO: 1081 - DNA, 17 bp, Homo sapiens
cctgaagaccgaggacc

SEQ ID NO: 1082 - DNA, 17 bp, Homo sapiens
ctgaagaccgaggaccc

SEQ ID NO: 1083 - DNA, 17 bp, Homo sapiens
tgaagaccgaggaccct

SEQ ID NO: 1084 - DNA, 17 bp, Homo sapiens
gaagaccgaggaccctg

SEQ ID NO: 1085 - DNA, 17 bp, Homo sapiens
aagaccgaggaccctga

SEQ ID NO: 1086 - DNA, 17 bp, Homo sapiens
agaccgaggaccctgag

SEQ ID NO: 1087 - DNA, 17 bp, Homo sapiens
gaccgaggaccctgagt

SEQ ID NO: 1088 - DNA, 17 bp, Homo sapiens
accgaggaccctgagta

SEQ ID NO: 1089 - DNA, 17 bp, Homo sapiens
ccgaggaccctgagtac

SEQ ID NO: 1090 - DNA, 17 bp, Homo sapiens
cgaggaccctgagtacg

SEQ ID NO: 1091 - DNA, 17 bp, Homo sapiens
gaggaccctgagtacga

SEQ ID NO: 1092 - DNA, 17 bp, Homo sapiens
aggaccctgagtacgac

SEQ ID NO: 1093 - DNA, 17 bp, Homo sapiens
ggaccctgagtacgacg

SEQ ID NO: 1094 - DNA, 17 bp, Homo sapiens
gaccctgagtacgacgt

SEQ ID NO: 1095 - DNA, 17 bp, Homo sapiens
accctgagtacgacgtg

SEQ ID NO: 1096 - DNA, 17 bp, Homo sapiens
ccctgagtacgacgtgc

SEQ ID NO: 1097 - DNA, 17 bp, Homo sapiens
cctgagtacgacgtgca

SEQ ID NO: 1098 - DNA, 17 bp, Homo sapiens
ctgagtacgacgtgcag

SEQ ID NO: 1099 - DNA, 17 bp, Homo sapiens
tgagtacgacgtgcaga

SEQ ID NO: 1100 - DNA, 17 bp, Homo sapiens
gagtacgacgtgcagag

SEQ ID NO: 1101 - DNA, 17 bp, Homo sapiens
agtacgacgtgcagagc

SEQ ID NO: 1102 - DNA, 17 bp, Homo sapiens
gtacgacgtgcagagca

SEQ ID NO: 1103 - DNA, 17 bp, Homo sapiens
tacgacgtgcagagcaa

SEQ ID NO: 1104 - DNA, 17 bp, Homo sapiens
acgacgtgcagagcaag

SEQ ID NO: 1105 - DNA, 17 bp, Homo sapiens
cgacgtgcagagcaagc

SEQ ID NO: 1106 - DNA, 17 bp, Homo sapiens
gacgtgcagagcaagca

SEQ ID NO: 1107 - DNA, 17 bp, Homo sapiens
acgtgcagagcaagcag

SEQ ID NO: 1108 - DNA, 17 bp, Homo sapiens
cgtgcagagcaagcagt

SEQ ID NO: 1109 - DNA, 17 bp, Homo sapiens
gtgcagagcaagcagtg

SEQ ID NO: 1110 - DNA, 17 bp, Homo sapiens
tgcagagcaagcagtgg

SEQ ID NO: 1111 - DNA, 17 bp, Homo sapiens
gcagagcaagcagtggc

SEQ ID NO: 1112 - DNA, 17 bp, Homo sapiens
cagagcaagcagtggct

SEQ ID NO: 1113 - DNA, 17 bp, Homo sapiens
agagcaagcagtggctc

SEQ ID NO: 1114 - DNA, 17 bp, Homo sapiens
gagcaagcagtggctca

SEQ ID NO: 1115 - DNA, 17 bp, Homo sapiens
agcaagcagtggctcac

SEQ ID NO: 1116 - DNA, 17 bp, Homo sapiens
gcaagcagtggctcacc

SEQ ID NO: 1117 - DNA, 17 bp, Homo sapiens
caagcagtggctcaccc

SEQ ID NO: 1118 - DNA, 17 bp, Homo sapiens
aagcagtggctcaccca

SEQ ID NO: 1119 - DNA, 17 bp, Homo sapiens
agcagtggctcacccat

SEQ ID NO: 1120 - DNA, 17 bp, Homo sapiens
gcagtggctcacccatt

SEQ ID NO: 1121 - DNA, 17 bp, Homo sapiens
cagtggctcacccattt

SEQ ID NO: 1122 - DNA, 17 bp, Homo sapiens
agtggctcacccatttg

SEQ ID NO: 1123 - DNA, 17 bp, Homo sapiens
gtggctcacccatttgc

SEQ ID NO: 1124 - DNA, 17 bp, Homo sapiens
tggctcacccatttgct

SEQ ID NO: 1125 - DNA, 17 bp, Homo sapiens
ggctcacccatttgctc

SEQ ID NO: 1126 - DNA, 17 bp, Homo sapiens
gctcacccatttgctcg

SEQ ID NO: 1127 - DNA, 17 bp, Homo sapiens
ctcacccatttgctcga

SEQ ID NO: 1128 - DNA, 17 bp, Homo sapiens
tcacccatttgctcgat

SEQ ID NO: 1129 - DNA, 17 bp, Homo sapiens
cacccatttgctcgatc

SEQ ID NO: 1130 - DNA, 17 bp, Homo sapiens
acccatttgctcgatca

SEQ ID NO: 1131 - DNA, 17 bp, Homo sapiens
cccatttgctcgatcaa

SEQ ID NO: 1132 - DNA, 17 bp, Homo sapiens
ccatttgctcgatcaat

SEQ ID NO: 1133 - DNA, 17 bp, Homo sapiens
catttgctcgatcaatt

SEQ ID NO: 1134 - DNA, 17 bp, Homo sapiens
atttgctcgatcaattt

SEQ ID NO: 1135 - DNA, 17 bp, Homo sapiens
tttgctcgatcaattta

SEQ ID NO: 1136 - DNA, 17 bp, Homo sapiens
ttgctcgatcaatttac

SEQ ID NO: 1137 - DNA, 17 bp, Homo sapiens
tgctcgatcaatttacc

SEQ ID NO: 1138 - DNA, 17 bp, Homo sapiens
gctcgatcaatttacca

SEQ ID NO: 1139 - DNA, 17 bp, Homo sapiens
ctcgatcaatttaccaa

SEQ ID NO: 1140 - DNA, 17 bp, Homo sapiens
tcgatcaatttaccaac

SEQ ID NO: 1141 - DNA, 17 bp, Homo sapiens
cgatcaatttaccaaca

SEQ ID NO: 1142 - DNA, 17 bp, Homo sapiens
gatcaatttaccaacat

SEQ ID NO: 1143 - DNA, 17 bp, Homo sapiens
atcaatttaccaacatt

SEQ ID NO: 1144 - DNA, 17 bp, Homo sapiens
tcaatttaccaacatta

SEQ ID NO: 1145 - DNA, 17 bp, Homo sapiens
caatttaccaacattaa

SEQ ID NO: 1146 - DNA, 17 bp, Homo sapiens
aatttaccaacattaag

SEQ ID NO: 1147 - DNA, 17 bp, Homo sapiens
atttaccaacattaaga

SEQ ID NO: 1148 - DNA, 17 bp, Homo sapiens
tttaccaacattaagaa

SEQ ID NO: 1149 - DNA, 17 bp, Homo sapiens
ttaccaacattaagaac

SEQ ID NO: 1150 - DNA, 17 bp, Homo sapiens
taccaacattaagaaca

SEQ ID NO: 1151 - DNA, 17 bp, Homo sapiens
accaacattaagaacat

SEQ ID NO: 1152 - DNA, 17 bp, Homo sapiens
ccaacattaagaacatc

SEQ ID NO: 1153 - DNA, 17 bp, Homo sapiens
caacattaagaacatct

SEQ ID NO: 1154 - DNA, 17 bp, Homo sapiens
aacattaagaacatctt

SEQ ID NO: 1155 - DNA, 17 bp, Homo sapiens
acattaagaacatcttg

SEQ ID NO: 1156 - DNA, 17 bp, Homo sapiens
cattaagaacatcttgg

SEQ ID NO: 1157 - DNA, 17 bp, Homo sapiens
attaagaacatcttggc

SEQ ID NO: 1158 - DNA, 17 bp, Homo sapiens
ttaagaacatcttggcc

SEQ ID NO: 1159 - DNA, 17 bp, Homo sapiens
taagaacatcttggcct

SEQ ID NO: 1160 - DNA, 17 bp, Homo sapiens
aagaacatcttggcctt

SEQ ID NO: 1161 - DNA, 17 bp, Homo sapiens
agaacatcttggccttg

SEQ ID NO: 1162 - DNA, 17 bp, Homo sapiens
gaacatcttggccttga

SEQ ID NO: 1163 - DNA, 17 bp, Homo sapiens
aacatcttggccttgaa

SEQ ID NO: 1164 - DNA, 17 bp, Homo sapiens
acatcttggccttgaaa

SEQ ID NO: 1165 - DNA, 17 bp, Homo sapiens
catcttggccttgaaaa

SEQ ID NO: 1166 - DNA, 17 bp, Homo sapiens
atcttggccttgaaaaa

SEQ ID NO: 1167 - DNA, 17 bp, Homo sapiens
tcttggccttgaaaaaa

SEQ ID NO: 1168 - DNA, 17 bp, Homo sapiens
cttggccttgaaaaaaa

SEQ ID NO: 1169 - DNA, 17 bp, Homo sapiens
ttggccttgaaaaaaat

SEQ ID NO: 1170 - DNA, 17 bp, Homo sapiens
tggccttgaaaaaaatt

SEQ ID NO: 1171 - DNA, 17 bp, Homo sapiens
ggccttgaaaaaaattg

SEQ ID NO: 1172 - DNA, 17 bp, Homo sapiens
gccttgaaaaaaattga

SEQ ID NO: 1173 - DNA, 17 bp, Homo sapiens
ccttgaaaaaaattgag

SEQ ID NO: 1174 - DNA, 17 bp, Homo sapiens
cttgaaaaaaattgagg

SEQ ID NO: 1175 - DNA, 17 bp, Homo sapiens
ttgaaaaaaattgaggt

SEQ ID NO: 1176 - DNA, 17 bp, Homo sapiens
tgaaaaaaattgaggta

SEQ ID NO: 1177 - DNA, 17 bp, Homo sapiens
gaaaaaaattgaggtag

SEQ ID NO: 1178 - DNA, 17 bp, Homo sapiens
aaaaaaattgaggtagt

SEQ ID NO: 1179 - DNA, 17 bp, Homo sapiens
aaaaaattgaggtagtc

SEQ ID NO: 1180 - DNA, 17 bp, Homo sapiens
aaaaattgaggtagtcc

SEQ ID NO: 1181 - DNA, 17 bp, Homo sapiens
aaaattgaggtagtcca

SEQ ID NO: 1182 - DNA, 17 bp, Homo sapiens
aaattgaggtagtccac

SEQ ID NO: 1183 - DNA, 17 bp, Homo sapiens
aattgaggtagtccact

SEQ ID NO: 1184 - DNA, 17 bp, Homo sapiens
attgaggtagtccactt

SEQ ID NO: 1185 - DNA, 17 bp, Homo sapiens
ttgaggtagtccacttt

SEQ ID NO: 1186 - DNA, 17 bp, Homo sapiens
tgaggtagtccacttta

SEQ ID NO: 1187 - DNA, 17 bp, Homo sapiens
gaggtagtccactttac

SEQ ID NO: 1188 - DNA, 17 bp, Homo sapiens
aggtagtccactttaca

SEQ ID NO: 1189 - DNA, 17 bp, Homo sapiens
ggtagtccactttacat

SEQ ID NO: 1190 - DNA, 17 bp, Homo sapiens
gtagtccactttacatc

SEQ ID NO: 1191 - DNA, 17 bp, Homo sapiens
tagtccactttacatcg

SEQ ID NO: 1192 - DNA, 17 bp, Homo sapiens
agtccactttacatcgc

SEQ ID NO: 1193 - DNA, 17 bp, Homo sapiens
gtccactttacatcgct

SEQ ID NO: 1194 - DNA, 17 bp, Homo sapiens
tccactttacatcgctt

SEQ ID NO: 1195 - DNA, 17 bp, Homo sapiens
ccactttacatcgcttt

SEQ ID NO: 1196 - DNA, 17 bp, Homo sapiens
cactttacatcgctttc

SEQ ID NO: 1197 - DNA, 17 bp, Homo sapiens
actttacatcgctttcc

SEQ ID NO: 1198 - DNA, 17 bp, Homo sapiens
ctttacatcgctttcca

SEQ ID NO: 1199 - DNA, 17 bp, Homo sapiens
tttacatcgctttccag

SEQ ID NO: 1200 - DNA, 17 bp, Homo sapiens
ttacatcgctttccaga

SEQ ID NO: 1201 - DNA, 17 bp, Homo sapiens
tacatcgctttccagac

SEQ ID NO: 1202 - DNA, 17 bp, Homo sapiens
acatcgctttccagaca

SEQ ID NO: 1203 - DNA, 17 bp, Homo sapiens
catcgctttccagacaa

SEQ ID NO: 1204 - DNA, 17 bp, Homo sapiens
atcgctttccagacaac

SEQ ID NO: 1205 - DNA, 17 bp, Homo sapiens
tcgctttccagacaact

SEQ ID NO: 1206 - DNA, 17 bp, Homo sapiens
cgctttccagacaactg

SEQ ID NO: 1207 - DNA, 17 bp, Homo sapiens
gctttccagacaactgg

SEQ ID NO: 1208 - DNA, 17 bp, Homo sapiens
ctttccagacaactgga

SEQ ID NO: 1209 - DNA, 17 bp, Homo sapiens
tttccagacaactggaa

SEQ ID NO: 1210 - DNA, 17 bp, Homo sapiens
ttccagacaactggaat

SEQ ID NO: 1211 - DNA, 17 bp, Homo sapiens
tccagacaactggaatt

SEQ ID NO: 1212 - DNA, 17 bp, Homo sapiens
ccagacaactggaattt

SEQ ID NO: 1213 - DNA, 17 bp, Homo sapiens
cagacaactggaatttg

SEQ ID NO: 1214 - DNA, 17 bp, Homo sapiens
agacaactggaatttga

SEQ ID NO: 1215 - DNA, 17 bp, Homo sapiens
gacaactggaatttgag

SEQ ID NO: 1216 - DNA, 17 bp, Homo sapiens
acaactggaatttgagg

SEQ ID NO: 1217 - DNA, 17 bp, Homo sapiens
caactggaatttgaggc

SEQ ID NO: 1218 - DNA, 17 bp, Homo sapiens
aactggaatttgaggca

SEQ ID NO: 1219 - DNA, 17 bp, Homo sapiens
actggaatttgaggcaa

SEQ ID NO: 1220 - DNA, 17 bp, Homo sapiens
ctggaatttgaggcaac

SEQ ID NO: 1221 - DNA, 17 bp, Homo sapiens
tggaatttgaggcaact

SEQ ID NO: 1222 - DNA, 17 bp, Homo sapiens
ggaatttgaggcaactt

SEQ ID NO: 1223 - DNA, 17 bp, Homo sapiens
gaatttgaggcaacttc

SEQ ID NO: 1224 - DNA, 17 bp, Homo sapiens
aatttgaggcaacttct

SEQ ID NO: 1225 - DNA, 17 bp, Homo sapiens
atttgaggcaacttctg

SEQ ID NO: 1226 - DNA, 17 bp, Homo sapiens
tttgaggcaacttctgt

SEQ ID NO: 1227 - DNA, 17 bp, Homo sapiens
ttgaggcaacttctgtg

SEQ ID NO: 1228 - DNA, 17 bp, Homo sapiens
tgaggcaacttctgtga

SEQ ID NO: 1229 - DNA, 17 bp, Homo sapiens
gaggcaacttctgtgac

SEQ ID NO: 1230 - DNA, 17 bp, Homo sapiens
aggcaacttctgtgact

SEQ ID NO: 1231 - DNA, 17 bp, Homo sapiens
ggcaacttctgtgactg

SEQ ID NO: 1232 - DNA, 17 bp, Homo sapiens
gcaacttctgtgactgt

SEQ ID NO: 1233 - DNA, 17 bp, Homo sapiens
caacttctgtgactgtg

SEQ ID NO: 1234 - DNA, 17 bp, Homo sapiens
aacttctgtgactgtga

SEQ ID NO: 1235 - DNA, 17 bp, Homo sapiens
acttctgtgactgtgat

SEQ ID NO: 1236 - DNA, 17 bp, Homo sapiens
cttctgtgactgtgatc

SEQ ID NO: 1237 - DNA, 17 bp, Homo sapiens
ttctgtgactgtgatcc

SEQ ID NO: 1238 - DNA, 17 bp, Homo sapiens
tctgtgactgtgatccc

SEQ ID NO: 1239 - DNA, 17 bp, Homo sapiens
ctgtgactgtgatccct

SEQ ID NO: 1240 - DNA, 17 bp, Homo sapiens
tgtgactgtgatccctg

SEQ ID NO: 1241 - DNA, 17 bp, Homo sapiens
gtgactgtgatccctgt

SEQ ID NO: 1242 - DNA, 17 bp, Homo sapiens
tgactgtgatccctgtg

SEQ ID NO: 1243 - DNA, 17 bp, Homo sapiens
gactgtgatccctgtgt

SEQ ID NO: 1244 - DNA, 17 bp, Homo sapiens
actgtgatccctgtgtt

SEQ ID NO: 1245 - DNA, 17 bp, Homo sapiens
ctgtgatccctgtgttt

SEQ ID NO: 1246 - DNA, 17 bp, Homo sapiens
tgtgatccctgtgtttc

SEQ ID NO: 1247 - DNA, 17 bp, Homo sapiens
gtgatccctgtgtttca

SEQ ID NO: 1248 - DNA, 17 bp, Homo sapiens
tgatccctgtgtttcac

SEQ ID NO: 1249 - DNA, 17 bp, Homo sapiens
gatccctgtgtttcacc

SEQ ID NO: 1250 - DNA, 17 bp, Homo sapiens
atccctgtgtttcacct

SEQ ID NO: 1251 - DNA, 17 bp, Homo sapiens
tccctgtgtttcacctg

SEQ ID NO: 1252 - DNA, 17 bp, Homo sapiens
ccctgtgtttcacctgg

SEQ ID NO: 1253 - DNA, 17 bp, Homo sapiens
cctgtgtttcacctggc

SEQ ID NO: 1254 - DNA, 17 bp, Homo sapiens
ctgtgtttcacctggca

SEQ ID NO: 1255 - DNA, 17 bp, Homo sapiens
tgtgtttcacctggcat

SEQ ID NO: 1256 - DNA, 17 bp, Homo sapiens
gtgtttcacctggcata

SEQ ID NO: 1257 - DNA, 17 bp, Homo sapiens
tgtttcacctggcatac

SEQ ID NO: 1258 - DNA, 17 bp, Homo sapiens
gtttcacctggcataca

SEQ ID NO: 1259 - DNA, 17 bp, Homo sapiens
tttcacctggcatacat

SEQ ID NO: 1260 - DNA, 17 bp, Homo sapiens
ttcacctggcatacatt

SEQ ID NO: 1261 - DNA, 17 bp, Homo sapiens
tcacctggcatacattc

SEQ ID NO: 1262 - DNA, 17 bp, Homo sapiens
cacctggcatacattct

SEQ ID NO: 1263 - DNA, 17 bp, Homo sapiens
acctggcatacattctc

SEQ ID NO: 1264 - DNA, 17 bp, Homo sapiens
cctggcatacattctca

SEQ ID NO: 1265 - DNA, 17 bp, Homo sapiens
ctggcatacattctcat

SEQ ID NO: 1266 - DNA, 17 bp, Homo sapiens
tggcatacattctcatc

SEQ ID NO: 1267 - DNA, 17 bp, Homo sapiens
ggcatacattctcatca

SEQ ID NO: 1268 - DNA, 17 bp, Homo sapiens
gcatacattctcatcat

SEQ ID NO: 1269 - DNA, 17 bp, Homo sapiens
catacattctcatcatt

SEQ ID NO: 1270 - DNA, 17 bp, Homo sapiens
atacattctcatcattc

SEQ ID NO: 1271 - DNA, 17 bp, Homo sapiens
tacattctcatcattct

SEQ ID NO: 1272 - DNA, 17 bp, Homo sapiens
acattctcatcattctg

SEQ ID NO: 1273 - DNA, 17 bp, Homo sapiens
cattctcatcattctgt

SEQ ID NO: 1274 - DNA, 17 bp, Homo sapiens
attctcatcattctgtt

SEQ ID NO: 1275 - DNA, 17 bp, Homo sapiens
ttctcatcattctgttt

SEQ ID NO: 1276 - DNA, 17 bp, Homo sapiens
tctcatcattctgtttg

SEQ ID NO: 1277 - DNA, 17 bp, Homo sapiens
ctcatcattctgtttgc

SEQ ID NO: 1278 - DNA, 17 bp, Homo sapiens
tcatcattctgtttgca

SEQ ID NO: 1279 - DNA, 17 bp, Homo sapiens
catcattctgtttgcag

SEQ ID NO: 1280 - DNA, 17 bp, Homo sapiens
atcattctgtttgcagt

SEQ ID NO: 1281 - DNA, 17 bp, Homo sapiens
tcattctgtttgcagtc

SEQ ID NO: 1282 - DNA, 17 bp, Homo sapiens
cattctgtttgcagtca

SEQ ID NO: 1283 - DNA, 17 bp, Homo sapiens
attctgtttgcagtcac

SEQ ID NO: 1284 - DNA, 17 bp, Homo sapiens
ttctgtttgcagtcaca

SEQ ID NO: 1285 - DNA, 17 bp, Homo sapiens
tctgtttgcagtcacat

SEQ ID NO: 1286 - DNA, 17 bp, Homo sapiens
ctgtttgcagtcacatc

SEQ ID NO: 1287 - DNA, 17 bp, Homo sapiens
tgtttgcagtcacatca

SEQ ID NO: 1288 - DNA, 17 bp, Homo sapiens
gtttgcagtcacatcat

SEQ ID NO: 1289 - DNA, 17 bp, Homo sapiens
tttgcagtcacatcatg

SEQ ID NO: 1290 - DNA, 17 bp, Homo sapiens
ttgcagtcacatcatgc

SEQ ID NO: 1291 - DNA, 17 bp, Homo sapiens
tgcagtcacatcatgct

SEQ ID NO: 1292 - DNA, 17 bp, Homo sapiens
gcagtcacatcatgctt

SEQ ID NO: 1293 - DNA, 17 bp, Homo sapiens
cagtcacatcatgcttt

SEQ ID NO: 1294 - DNA, 17 bp, Homo sapiens
agtcacatcatgcttta

SEQ ID NO: 1295 - DNA, 17 bp, Homo sapiens
gtcacatcatgctttag

SEQ ID NO: 1296 - DNA, 17 bp, Homo sapiens
tcacatcatgctttagg

SEQ ID NO: 1297 - DNA, 17 bp, Homo sapiens
cacatcatgctttaggt

SEQ ID NO: 1298 - DNA, 17 bp, Homo sapiens
acatcatgctttaggtt

SEQ ID NO: 1299 - DNA, 17 bp, Homo sapiens
catcatgctttaggttt

SEQ ID NO: 1300 - DNA, 17 bp, Homo sapiens
atcatgctttaggtttg

SEQ ID NO: 1301 - DNA, 17 bp, Homo sapiens
tcatgctttaggtttga

SEQ ID NO: 1302 - DNA, 17 bp, Homo sapiens
catgctttaggtttgac

SEQ ID NO: 1303 - DNA, 17 bp, Homo sapiens
atgctttaggtttgact

SEQ ID NO: 1304 - DNA, 17 bp, Homo sapiens
tgctttaggtttgactg

SEQ ID NO: 1305 - DNA, 17 bp, Homo sapiens
gctttaggtttgactgc

SEQ ID NO: 1306 - DNA, 17 bp, Homo sapiens
ctttaggtttgactgca

SEQ ID NO: 1307 - DNA, 17 bp, Homo sapiens
tttaggtttgactgcat

SEQ ID NO: 1308 - DNA, 17 bp, Homo sapiens
ttaggtttgactgcata

SEQ ID NO: 1309 - DNA, 17 bp, Homo sapiens
taggtttgactgcatac

SEQ ID NO: 1310 - DNA, 17 bp, Homo sapiens
aggtttgactgcatacg

SEQ ID NO: 1311 - DNA, 17 bp, Homo sapiens
ggtttgactgcatacga

SEQ ID NO: 1312 - DNA, 17 bp, Homo sapiens
gtttgactgcatacgaa

SEQ ID NO: 1313 - DNA, 17 bp, Homo sapiens
tttgactgcatacgaaa

SEQ ID NO: 1314 - DNA, 17 bp, Homo sapiens
ttgactgcatacgaaac

SEQ ID NO: 1315 - DNA, 17 bp, Homo sapiens
tgactgcatacgaaaca

SEQ ID NO: 1316 - DNA, 17 bp, Homo sapiens
gactgcatacgaaacaa

SEQ ID NO: 1317 - DNA, 17 bp, Homo sapiens
actgcatacgaaacaaa

SEQ ID NO: 1318 - DNA, 17 bp, Homo sapiens
ctgcatacgaaacaaaa

SEQ ID NO: 1319 - DNA, 17 bp, Homo sapiens
tgcatacgaaacaaaat

SEQ ID NO: 1320 - DNA, 17 bp, Homo sapiens
gcatacgaaacaaaatg

SEQ ID NO: 1321 - DNA, 17 bp, Homo sapiens
catacgaaacaaaatgt

SEQ ID NO: 1322 - DNA, 17 bp, Homo sapiens
atacgaaacaaaatgtg

SEQ ID NO: 1323 - DNA, 17 bp, Homo sapiens
tacgaaacaaaatgtgt

SEQ ID NO: 1324 - DNA, 17 bp, Homo sapiens
acgaaacaaaatgtgtg

SEQ ID NO: 1325 - DNA, 17 bp, Homo sapiens
cgaaacaaaatgtgtgt

SEQ ID NO: 1326 - DNA, 17 bp, Homo sapiens
gaaacaaaatgtgtgtt

SEQ ID NO: 1327 - DNA, 17 bp, Homo sapiens
aaacaaaatgtgtgttg

SEQ ID NO: 1328 - DNA, 17 bp, Homo sapiens
aacaaaatgtgtgttgc

SEQ ID NO: 1329 - DNA, 17 bp, Homo sapiens
acaaaatgtgtgttgcg

SEQ ID NO: 1330 - DNA, 17 bp, Homo sapiens
caaaatgtgtgttgcgg

SEQ ID NO: 1331 - DNA, 17 bp, Homo sapiens
aaaatgtgtgttgcggc

SEQ ID NO: 1332 - DNA, 17 bp, Homo sapiens
aaatgtgtgttgcggcc

SEQ ID NO: 1333 - DNA, 17 bp, Homo sapiens
aatgtgtgttgcggcct

SEQ ID NO: 1334 - DNA, 17 bp, Homo sapiens
atgtgtgttgcggcctt

SEQ ID NO: 1335 - DNA, 17 bp, Homo sapiens
tgtgtgttgcggccttt

SEQ ID NO: 1336 - DNA, 17 bp, Homo sapiens
gtgtgttgcggcctttg

SEQ ID NO: 1337 - DNA, 17 bp, Homo sapiens
tgtgttgcggcctttgg

SEQ ID NO: 1338 - DNA, 17 bp, Homo sapiens
gtgttgcggcctttgga

SEQ ID NO: 1339 - DNA, 17 bp, Homo sapiens
tgttgcggcctttggag

SEQ ID NO: 1340 - DNA, 17 bp, Homo sapiens
gttgcggcctttggagt

SEQ ID NO: 1341 - DNA, 17 bp, Homo sapiens
ttgcggcctttggagtg

SEQ ID NO: 1342 - DNA, 17 bp, Homo sapiens
tgcggcctttggagtga

SEQ ID NO: 1343 - DNA, 17 bp, Homo sapiens
gcggcctttggagtgat

SEQ ID NO: 1344 - DNA, 17 bp, Homo sapiens
cggcctttggagtgatt

SEQ ID NO: 1345 - DNA, 17 bp, Homo sapiens
ggcctttggagtgattt

SEQ ID NO: 1346 - DNA, 17 bp, Homo sapiens
gcctttggagtgatttc

SEQ ID NO: 1347 - DNA, 17 bp, Homo sapiens
cctttggagtgatttct

SEQ ID NO: 1348 - DNA, 17 bp, Homo sapiens
ctttggagtgatttctg

SEQ ID NO: 1349 - DNA, 17 bp, Homo sapiens
tttggagtgatttctgc

SEQ ID NO: 1350 - DNA, 17 bp, Homo sapiens
ttggagtgatttctgct

SEQ ID NO: 1351 - DNA, 17 bp, Homo sapiens
tggagtgatttctgctt

SEQ ID NO: 1352 - DNA, 17 bp, Homo sapiens
ggagtgatttctgcttt

SEQ ID NO: 1353 - DNA, 17 bp, Homo sapiens
gagtgatttctgctttc

SEQ ID NO: 1354 - DNA, 17 bp, Homo sapiens
agtgatttctgctttct

SEQ ID NO: 1355 - DNA, 17 bp, Homo sapiens
gtgatttctgctttctt

SEQ ID NO: 1356 - DNA, 17 bp, Homo sapiens
tgatttctgctttcttg

SEQ ID NO: 1357 - DNA, 17 bp, Homo sapiens
gatttctgctttcttgg

SEQ ID NO: 1358 - DNA, 17 bp, Homo sapiens
atttctgctttcttggc

SEQ ID NO: 1359 - DNA, 17 bp, Homo sapiens
tttctgctttcttggca

SEQ ID NO: 1360 - DNA, 17 bp, Homo sapiens
ttctgctttcttggcag

SEQ ID NO: 1361 - DNA, 17 bp, Homo sapiens
tctgctttcttggcagt

SEQ ID NO: 1362 - DNA, 17 bp, Homo sapiens
ctgctttcttggcagtg

SEQ ID NO: 1363 - DNA, 17 bp, Homo sapiens
tgctttcttggcagtgg

SEQ ID NO: 1364 - DNA, 17 bp, Homo sapiens
gctttcttggcagtggt

SEQ ID NO: 1365 - DNA, 17 bp, Homo sapiens
ctttcttggcagtggtg

SEQ ID NO: 1366 - DNA, 17 bp, Homo sapiens
tttcttggcagtggtga

SEQ ID NO: 1367 - DNA, 17 bp, Homo sapiens
ttcttggcagtggtgag

SEQ ID NO: 1368 - DNA, 17 bp, Homo sapiens
tcttggcagtggtgagc

SEQ ID NO: 1369 - DNA, 17 bp, Homo sapiens
cttggcagtggtgagcg

SEQ ID NO: 1370 - DNA, 17 bp, Homo sapiens
ttggcagtggtgagcgg

SEQ ID NO: 1371 - DNA, 17 bp, Homo sapiens
tggcagtggtgagcggc

SEQ ID NO: 1372 - DNA, 17 bp, Homo sapiens
ggcagtggtgagcggct

SEQ ID NO: 1373 - DNA, 17 bp, Homo sapiens
gcagtggtgagcggctt

SEQ ID NO: 1374 - DNA, 17 bp, Homo sapiens
cagtggtgagcggcttt

SEQ ID NO: 1375 - DNA, 17 bp, Homo sapiens
agtggtgagcggctttg

SEQ ID NO: 1376 - DNA, 17 bp, Homo sapiens
gtggtgagcggctttgg

SEQ ID NO: 1377 - DNA, 17 bp, Homo sapiens
tggtgagcggctttggc

SEQ ID NO: 1378 - DNA, 17 bp, Homo sapiens
ggtgagcggctttggcc

SEQ ID NO: 1379 - DNA, 17 bp, Homo sapiens
gtgagcggctttggcct

SEQ ID NO: 1380 - DNA, 17 bp, Homo sapiens
tgagcggctttggcctg

SEQ ID NO: 1381 - DNA, 17 bp, Homo sapiens
gagcggctttggcctgc

SEQ ID NO: 1382 - DNA, 17 bp, Homo sapiens
agcggctttggcctgct

SEQ ID NO: 1383 - DNA, 17 bp, Homo sapiens
gcggctttggcctgctg

SEQ ID NO: 1384 - DNA, 17 bp, Homo sapiens
cggctttggcctgctgt

SEQ ID NO: 1385 - DNA, 17 bp, Homo sapiens
ggctttggcctgctgtt

SEQ ID NO: 1386 - DNA, 17 bp, Homo sapiens
gctttggcctgctgttg

SEQ ID NO: 1387 - DNA, 17 bp, Homo sapiens
ctttggcctgctgttgc

SEQ ID NO: 1388 - DNA, 17 bp, Homo sapiens
tttggcctgctgttgca

SEQ ID NO: 1389 - DNA, 17 bp, Homo sapiens
ttggcctgctgttgcac

SEQ ID NO: 1390 - DNA, 17 bp, Homo sapiens
tggcctgctgttgcaca

SEQ ID NO: 1391 - DNA, 17 bp, Homo sapiens
ggcctgctgttgcacat

SEQ ID NO: 1392 - DNA, 17 bp, Homo sapiens
gcctgctgttgcacatt

SEQ ID NO: 1393 - DNA, 17 bp, Homo sapiens
cctgctgttgcacattg

SEQ ID NO: 1394 - DNA, 17 bp, Homo sapiens
ctgctgttgcacattgg

SEQ ID NO: 1395 - DNA, 17 bp, Homo sapiens
tgctgttgcacattggg

SEQ ID NO: 1396 - DNA, 17 bp, Homo sapiens
gctgttgcacattgggg

SEQ ID NO: 1397 - DNA, 17 bp, Homo sapiens
ctgttgcacattggggt

SEQ ID NO: 1398 - DNA, 17 bp, Homo sapiens
tgttgcacattggggtg

SEQ ID NO: 1399 - DNA, 17 bp, Homo sapiens
gttgcacattggggtgc

SEQ ID NO: 1400 - DNA, 17 bp, Homo sapiens
ttgcacattggggtgcc

SEQ ID NO: 1401 - DNA, 17 bp, Homo sapiens
tgcacattggggtgcca

SEQ ID NO: 1402 - DNA, 17 bp, Homo sapiens
gcacattggggtgccat

SEQ ID NO: 1403 - DNA, 17 bp, Homo sapiens
cacattggggtgccatt

SEQ ID NO: 1404 - DNA, 17 bp, Homo sapiens
acattggggtgccattt

SEQ ID NO: 1405 - DNA, 17 bp, Homo sapiens
cattggggtgccatttg

SEQ ID NO: 1406 - DNA, 17 bp, Homo sapiens
attggggtgccatttgt

SEQ ID NO: 1407 - DNA, 17 bp, Homo sapiens
ttggggtgccatttgtc

SEQ ID NO: 1408 - DNA, 17 bp, Homo sapiens
tggggtgccatttgtca

SEQ ID NO: 1409 - DNA, 17 bp, Homo sapiens
ggggtgccatttgtcat

SEQ ID NO: 1410 - DNA, 17 bp, Homo sapiens
gggtgccatttgtcatc

SEQ ID NO: 1411 - DNA, 17 bp, Homo sapiens
ggtgccatttgtcatca

SEQ ID NO: 1412 - DNA, 17 bp, Homo sapiens
gtgccatttgtcatcat

SEQ ID NO: 1413 - DNA, 17 bp, Homo sapiens
tgccatttgtcatcata

SEQ ID NO: 1414 - DNA, 17 bp, Homo sapiens
gccatttgtcatcatag

SEQ ID NO: 1415 - DNA, 17 bp, Homo sapiens
ccatttgtcatcatagt

SEQ ID NO: 1416 - DNA, 17 bp, Homo sapiens
catttgtcatcatagtt

SEQ ID NO: 1417 - DNA, 17 bp, Homo sapiens
atttgtcatcatagttg

SEQ ID NO: 1418 - DNA, 17 bp, Homo sapiens
tttgtcatcatagttgc

SEQ ID NO: 1419 - DNA, 17 bp, Homo sapiens
ttgtcatcatagttgcc

SEQ ID NO: 1420 - DNA, 17 bp, Homo sapiens
tgtcatcatagttgcca

SEQ ID NO: 1421 - DNA, 17 bp, Homo sapiens
gtcatcatagttgccaa

SEQ ID NO: 1422 - DNA, 17 bp, Homo sapiens
tcatcatagttgccaat

SEQ ID NO: 1423 - DNA, 17 bp, Homo sapiens
catcatagttgccaatt

SEQ ID NO: 1424 - DNA, 17 bp, Homo sapiens
atcatagttgccaattc

SEQ ID NO: 1425 - DNA, 17 bp, Homo sapiens
tcatagttgccaattca

SEQ ID NO: 1426 - DNA, 17 bp, Homo sapiens
catagttgccaattcac

SEQ ID NO: 1427 - DNA, 17 bp, Homo sapiens
atagttgccaattcacc

SEQ ID NO: 1428 - DNA, 17 bp, Homo sapiens
tagttgccaattcacca

SEQ ID NO: 1429 - DNA, 17 bp, Homo sapiens
agttgccaattcaccat

SEQ ID NO: 1430 - DNA, 17 bp, Homo sapiens
gttgccaattcaccatt

SEQ ID NO: 1431 - DNA, 17 bp, Homo sapiens
ttgccaattcaccattt

SEQ ID NO: 1432 - DNA, 17 bp, Homo sapiens
tgccaattcaccatttc

SEQ ID NO: 1433 - DNA, 17 bp, Homo sapiens
gccaattcaccatttct

SEQ ID NO: 1434 - DNA, 17 bp, Homo sapiens
ccaattcaccatttctt

SEQ ID NO: 1435 - DNA, 17 bp, Homo sapiens
caattcaccatttctta

SEQ ID NO: 1436 - DNA, 17 bp, Homo sapiens
aattcaccatttcttat

SEQ ID NO: 1437 - DNA, 17 bp, Homo sapiens
attcaccatttcttatt

SEQ ID NO: 1438 - DNA, 17 bp, Homo sapiens
ttcaccatttcttattc

SEQ ID NO: 1439 - DNA, 17 bp, Homo sapiens
tcaccatttcttattct

SEQ ID NO: 1440 - DNA, 17 bp, Homo sapiens
caccatttcttattcta

SEQ ID NO: 1441 - DNA, 17 bp, Homo sapiens
accatttcttattctag

SEQ ID NO: 1442 - DNA, 17 bp, Homo sapiens
ccatttcttattctagg

SEQ ID NO: 1443 - DNA, 17 bp, Homo sapiens
catttcttattctaggt

SEQ ID NO: 1444 - DNA, 17 bp, Homo sapiens
atttcttattctaggtg

SEQ ID NO: 1445 - DNA, 17 bp, Homo sapiens
tttcttattctaggtgt

SEQ ID NO: 1446 - DNA, 17 bp, Homo sapiens
ttcttattctaggtgtt

SEQ ID NO: 1447 - DNA, 17 bp, Homo sapiens
tcttattctaggtgttg

SEQ ID NO: 1448 - DNA, 17 bp, Homo sapiens
cttattctaggtgttgg

SEQ ID NO: 1449 - DNA, 17 bp, Homo sapiens
ttattctaggtgttggg

SEQ ID NO: 1450 - DNA, 17 bp, Homo sapiens
tattctaggtgttgggg

SEQ ID NO: 1451 - DNA, 17 bp, Homo sapiens
attctaggtgttggggt

SEQ ID NO: 1452 - DNA, 17 bp, Homo sapiens
ttctaggtgttggggtc

SEQ ID NO: 1453 - DNA, 17 bp, Homo sapiens
tctaggtgttggggtcg

SEQ ID NO: 1454 - DNA, 17 bp, Homo sapiens
ctaggtgttggggtcga

SEQ ID NO: 1455 - DNA, 17 bp, Homo sapiens
taggtgttggggtcgat

SEQ ID NO: 1456 - DNA, 17 bp, Homo sapiens
aggtgttggggtcgatg

SEQ ID NO: 1457 - DNA, 17 bp, Homo sapiens
ggtgttggggtcgatga

SEQ ID NO: 1458 - DNA, 17 bp, Homo sapiens
gtgttggggtcgatgac

SEQ ID NO: 1459 - DNA, 17 bp, Homo sapiens
tgttggggtcgatgaca

SEQ ID NO: 1460 - DNA, 17 bp, Homo sapiens
gttggggtcgatgacat

SEQ ID NO: 1461 - DNA, 17 bp, Homo sapiens
ttggggtcgatgacatg

SEQ ID NO: 1462 - DNA, 17 bp, Homo sapiens
tggggtcgatgacatgt

SEQ ID NO: 1463 - DNA, 17 bp, Homo sapiens
ggggtcgatgacatgtt

SEQ ID NO: 1464 - DNA, 17 bp, Homo sapiens
gggtcgatgacatgttt

SEQ ID NO: 1465 - DNA, 17 bp, Homo sapiens
ggtcgatgacatgttta

SEQ ID NO: 1466 - DNA, 17 bp, Homo sapiens
gtcgatgacatgtttat

SEQ ID NO: 1467 - DNA, 17 bp, Homo sapiens
tcgatgacatgtttatc

SEQ ID NO: 1468 - DNA, 17 bp, Homo sapiens
cgatgacatgtttatca

SEQ ID NO: 1469 - DNA, 17 bp, Homo sapiens
gatgacatgtttatcat

SEQ ID NO: 1470 - DNA, 17 bp, Homo sapiens
atgacatgtttatcatg

SEQ ID NO: 1471 - DNA, 17 bp, Homo sapiens
tgacatgtttatcatga

SEQ ID NO: 1472 - DNA, 17 bp, Homo sapiens
gacatgtttatcatgat

SEQ ID NO: 1473 - DNA, 17 bp, Homo sapiens
acatgtttatcatgatt

SEQ ID NO: 1474 - DNA, 17 bp, Homo sapiens
catgtttatcatgattt

SEQ ID NO: 1475 - DNA, 17 bp, Homo sapiens
atgtttatcatgatttc

SEQ ID NO: 1476 - DNA, 17 bp, Homo sapiens
tgtttatcatgatttct

SEQ ID NO: 1477 - DNA, 17 bp, Homo sapiens
gtttatcatgatttctg

SEQ ID NO: 1478 - DNA, 17 bp, Homo sapiens
tttatcatgatttctgc

SEQ ID NO: 1479 - DNA, 17 bp, Homo sapiens
ttatcatgatttctgcc

SEQ ID NO: 1480 - DNA, 17 bp, Homo sapiens
tatcatgatttctgcct

SEQ ID NO: 1481 - DNA, 17 bp, Homo sapiens
atcatgatttctgcctg

SEQ ID NO: 1482 - DNA, 17 bp, Homo sapiens
tcatgatttctgcctgg

SEQ ID NO: 1483 - DNA, 17 bp, Homo sapiens
catgatttctgcctggc

SEQ ID NO: 1484 - DNA, 17 bp, Homo sapiens
atgatttctgcctggca

SEQ ID NO: 1485 - DNA, 17 bp, Homo sapiens
tgatttctgcctggcat

SEQ ID NO: 1486 - DNA, 17 bp, Homo sapiens
gatttctgcctggcata

SEQ ID NO: 1487 - DNA, 17 bp, Homo sapiens
atttctgcctggcataa

SEQ ID NO: 1488 - DNA, 17 bp, Homo sapiens
tttctgcctggcataag

SEQ ID NO: 1489 - DNA, 17 bp, Homo sapiens
ttctgcctggcataaga

SEQ ID NO: 1490 - DNA, 17 bp, Homo sapiens
tctgcctggcataagac

SEQ ID NO: 1491 - DNA, 17 bp, Homo sapiens
ctgcctggcataagacc

SEQ ID NO: 1492 - DNA, 17 bp, Homo sapiens
tgcctggcataagacca

SEQ ID NO: 1493 - DNA, 17 bp, Homo sapiens
gcctggcataagaccaa

SEQ ID NO: 1494 - DNA, 17 bp, Homo sapiens
cctggcataagaccaac

SEQ ID NO: 1495 - DNA, 17 bp, Homo sapiens
ctggcataagaccaacc

SEQ ID NO: 1496 - DNA, 17 bp, Homo sapiens
tggcataagaccaacct

SEQ ID NO: 1497 - DNA, 17 bp, Homo sapiens
ggcataagaccaacctt

SEQ ID NO: 1498 - DNA, 17 bp, Homo sapiens
gcataagaccaaccttg

SEQ ID NO: 1499 - DNA, 17 bp, Homo sapiens
cataagaccaaccttgc

SEQ ID NO: 1500 - DNA, 17 bp, Homo sapiens
ataagaccaaccttgca

SEQ ID NO: 1501 - DNA, 17 bp, Homo sapiens
taagaccaaccttgcag

SEQ ID NO: 1502 - DNA, 17 bp, Homo sapiens
aagaccaaccttgcagg

SEQ ID NO: 1503 - DNA, 17 bp, Homo sapiens
agaccaaccttgcaggt

SEQ ID NO: 1504 - DNA, 17 bp, Homo sapiens
gaccaaccttgcaggtg

SEQ ID NO: 1505 - DNA, 17 bp, Homo sapiens
accaaccttgcaggtga

SEQ ID NO: 1506 - DNA, 17 bp, Homo sapiens
ccaaccttgcaggtgac

SEQ ID NO: 1507 - DNA, 17 bp, Homo sapiens
caaccttgcaggtgaca

SEQ ID NO: 1508 - DNA, 17 bp, Homo sapiens
aaccttgcaggtgacat

SEQ ID NO: 1509 - DNA, 17 bp, Homo sapiens
accttgcaggtgacata

SEQ ID NO: 1510 - DNA, 17 bp, Homo sapiens
ccttgcaggtgacatac

SEQ ID NO: 1511 - DNA, 17 bp, Homo sapiens
cttgcaggtgacatacg

SEQ ID NO: 1512 - DNA, 17 bp, Homo sapiens
ttgcaggtgacatacga

SEQ ID NO: 1513 - DNA, 17 bp, Homo sapiens
tgcaggtgacatacgag

SEQ ID NO: 1514 - DNA, 17 bp, Homo sapiens
gcaggtgacatacgaga

SEQ ID NO: 1515 - DNA, 17 bp, Homo sapiens
caggtgacatacgagag

SEQ ID NO: 1516 - DNA, 17 bp, Homo sapiens
aggtgacatacgagagc

SEQ ID NO: 1517 - DNA, 17 bp, Homo sapiens
ggtgacatacgagagcg

SEQ ID NO: 1518 - DNA, 17 bp, Homo sapiens
gtgacatacgagagcgg

SEQ ID NO: 1519 - DNA, 17 bp, Homo sapiens
tgacatacgagagcgga

SEQ ID NO: 1520 - DNA, 17 bp, Homo sapiens
gacatacgagagcggat

SEQ ID NO: 1521 - DNA, 17 bp, Homo sapiens
acatacgagagcggatg

SEQ ID NO: 1522 - DNA, 17 bp, Homo sapiens
catacgagagcggatgt

SEQ ID NO: 1523 - DNA, 17 bp, Homo sapiens
atacgagagcggatgtc

SEQ ID NO: 1524 - DNA, 17 bp, Homo sapiens
tacgagagcggatgtcc

SEQ ID NO: 1525 - DNA, 17 bp, Homo sapiens
acgagagcggatgtcca

SEQ ID NO: 1526 - DNA, 17 bp, Homo sapiens
cgagagcggatgtccaa

SEQ ID NO: 1527 - DNA, 17 bp, Homo sapiens
gagagcggatgtccaat

SEQ ID NO: 1528 - DNA, 17 bp, Homo sapiens
agagcggatgtccaatg

SEQ ID NO: 1529 - DNA, 17 bp, Homo sapiens
gagcggatgtccaatgt

SEQ ID NO: 1530 - DNA, 17 bp, Homo sapiens
agcggatgtccaatgtc

SEQ ID NO: 1531 - DNA, 17 bp, Homo sapiens
gcggatgtccaatgtct

SEQ ID NO: 1532 - DNA, 17 bp, Homo sapiens
cggatgtccaatgtcta

SEQ ID NO: 1533 - DNA, 17 bp, Homo sapiens
ggatgtccaatgtctat

SEQ ID NO: 1534 - DNA, 17 bp, Homo sapiens
gatgtccaatgtctatt

SEQ ID NO: 1535 - DNA, 17 bp, Homo sapiens
atgtccaatgtctattc

SEQ ID NO: 1536 - DNA, 17 bp, Homo sapiens
tgtccaatgtctattca

SEQ ID NO: 1537 - DNA, 17 bp, Homo sapiens
gtccaatgtctattcaa

SEQ ID NO: 1538 - DNA, 17 bp, Homo sapiens
tccaatgtctattcaaa

SEQ ID NO: 1539 - DNA, 17 bp, Homo sapiens
ccaatgtctattcaaaa

SEQ ID NO: 1540 - DNA, 17 bp, Homo sapiens
caatgtctattcaaaag

SEQ ID NO: 1541 - DNA, 17 bp, Homo sapiens
aatgtctattcaaaagc

SEQ ID NO: 1542 - DNA, 17 bp, Homo sapiens
atgtctattcaaaagcg

SEQ ID NO: 1543 - DNA, 17 bp, Homo sapiens
tgtctattcaaaagcgg

SEQ ID NO: 1544 - DNA, 17 bp, Homo sapiens
gtctattcaaaagcggc

SEQ ID NO: 1545 - DNA, 17 bp, Homo sapiens
tctattcaaaagcggca

SEQ ID NO: 1546 - DNA, 17 bp, Homo sapiens
ctattcaaaagcggcag

SEQ ID NO: 1547 - DNA, 17 bp, Homo sapiens
tattcaaaagcggcagt

SEQ ID NO: 1548 - DNA, 17 bp, Homo sapiens
attcaaaagcggcagtg

SEQ ID NO: 1549 - DNA, 17 bp, Homo sapiens
ttcaaaagcggcagtgt

SEQ ID NO: 1550 - DNA, 17 bp, Homo sapiens
tcaaaagcggcagtgtc

SEQ ID NO: 1551 - DNA, 17 bp, Homo sapiens
caaaagcggcagtgtct

SEQ ID NO: 1552 - DNA, 17 bp, Homo sapiens
aaaagcggcagtgtcta

SEQ ID NO: 1553 - DNA, 17 bp, Homo sapiens
aaagcggcagtgtctat

SEQ ID NO: 1554 - DNA, 17 bp, Homo sapiens
aagcggcagtgtctatt

SEQ ID NO: 1555 - DNA, 17 bp, Homo sapiens
agcggcagtgtctatta

SEQ ID NO: 1556 - DNA, 17 bp, Homo sapiens
gcggcagtgtctattac

SEQ ID NO: 1557 - DNA, 17 bp, Homo sapiens
cggcagtgtctattaca

SEQ ID NO: 1558 - DNA, 17 bp, Homo sapiens
ggcagtgtctattacaa

SEQ ID NO: 1559 - DNA, 17 bp, Homo sapiens
gcagtgtctattacaat

SEQ ID NO: 1560 - DNA, 17 bp, Homo sapiens
cagtgtctattacaatc

SEQ ID NO: 1561 - DNA, 17 bp, Homo sapiens
agtgtctattacaatca

SEQ ID NO: 1562 - DNA, 17 bp, Homo sapiens
gtgtctattacaatcac

SEQ ID NO: 1563 - DNA, 17 bp, Homo sapiens
tgtctattacaatcacc

SEQ ID NO: 1564 - DNA, 17 bp, Homo sapiens
gtctattacaatcacca

SEQ ID NO: 1565 - DNA, 17 bp, Homo sapiens
tctattacaatcaccac

SEQ ID NO: 1566 - DNA, 17 bp, Homo sapiens
ctattacaatcaccacc

SEQ ID NO: 1567 - DNA, 17 bp, Homo sapiens
tattacaatcaccacca

SEQ ID NO: 1568 - DNA, 17 bp, Homo sapiens
attacaatcaccaccat

SEQ ID NO: 1569 - DNA, 17 bp, Homo sapiens
ttacaatcaccaccatc

SEQ ID NO: 1570 - DNA, 17 bp, Homo sapiens
tacaatcaccaccatca

SEQ ID NO: 1571 - DNA, 17 bp, Homo sapiens
acaatcaccaccatcac

SEQ ID NO: 1572 - DNA, 17 bp, Homo sapiens
caatcaccaccatcact

SEQ ID NO: 1573 - DNA, 17 bp, Homo sapiens
aatcaccaccatcacta

SEQ ID NO: 1574 - DNA, 17 bp, Homo sapiens
atcaccaccatcactaa

SEQ ID NO: 1575 - DNA, 17 bp, Homo sapiens
tcaccaccatcactaac

SEQ ID NO: 1576 - DNA, 17 bp, Homo sapiens
caccaccatcactaaca

SEQ ID NO: 1577 - DNA, 17 bp, Homo sapiens
accaccatcactaacat

SEQ ID NO: 1578 - DNA, 17 bp, Homo sapiens
ccaccatcactaacatc

SEQ ID NO: 1579 - DNA, 17 bp, Homo sapiens
caccatcactaacatcc

SEQ ID NO: 1580 - DNA, 17 bp, Homo sapiens
accatcactaacatcct

SEQ ID NO: 1581 - DNA, 17 bp, Homo sapiens
ccatcactaacatcctg

SEQ ID NO: 1582 - DNA, 17 bp, Homo sapiens
catcactaacatcctgg

SEQ ID NO: 1583 - DNA, 17 bp, Homo sapiens
atcactaacatcctggc

SEQ ID NO: 1584 - DNA, 17 bp, Homo sapiens
tcactaacatcctggcc

SEQ ID NO: 1585 - DNA, 17 bp, Homo sapiens
cactaacatcctggcct

SEQ ID NO: 1586 - DNA, 17 bp, Homo sapiens
actaacatcctggcctt

SEQ ID NO: 1587 - DNA, 17 bp, Homo sapiens
ctaacatcctggcctta

SEQ ID NO: 1588 - DNA, 17 bp, Homo sapiens
taacatcctggccttat

SEQ ID NO: 1589 - DNA, 17 bp, Homo sapiens
aacatcctggccttata

SEQ ID NO: 1590 - DNA, 17 bp, Homo sapiens
acatcctggccttatat

SEQ ID NO: 1591 - DNA, 17 bp, Homo sapiens
catcctggccttatata

SEQ ID NO: 1592 - DNA, 17 bp, Homo sapiens
atcctggccttatatac

SEQ ID NO: 1593 - DNA, 17 bp, Homo sapiens
tcctggccttatataca

SEQ ID NO: 1594 - DNA, 17 bp, Homo sapiens
cctggccttatatacag

SEQ ID NO: 1595 - DNA, 17 bp, Homo sapiens
ctggccttatatacagg

SEQ ID NO: 1596 - DNA, 17 bp, Homo sapiens
tggccttatatacaggg

SEQ ID NO: 1597 - DNA, 17 bp, Homo sapiens
ggccttatatacaggga

SEQ ID NO: 1598 - DNA, 17 bp, Homo sapiens
gccttatatacagggat

SEQ ID NO: 1599 - DNA, 17 bp, Homo sapiens
ccttatatacagggatt

SEQ ID NO: 1600 - DNA, 17 bp, Homo sapiens
cttatatacagggatta

SEQ ID NO: 1601 - DNA, 17 bp, Homo sapiens
ttatatacagggattat

SEQ ID NO: 1602 - DNA, 17 bp, Homo sapiens
tatatacagggattatg

SEQ ID NO: 1603 - DNA, 17 bp, Homo sapiens
atatacagggattatga

SEQ ID NO: 1604 - DNA, 17 bp, Homo sapiens
tatacagggattatgag

SEQ ID NO: 1605 - DNA, 17 bp, Homo sapiens
atacagggattatgagc

SEQ ID NO: 1606 - DNA, 17 bp, Homo sapiens
tacagggattatgagct

SEQ ID NO: 1607 - DNA, 17 bp, Homo sapiens
acagggattatgagctc

SEQ ID NO: 1608 - DNA, 17 bp, Homo sapiens
cagggattatgagctct

SEQ ID NO: 1609 - DNA, 17 bp, Homo sapiens
agggattatgagctctt

SEQ ID NO: 1610 - DNA, 17 bp, Homo sapiens
gggattatgagctcttt

SEQ ID NO: 1611 - DNA, 17 bp, Homo sapiens
ggattatgagctctttt

SEQ ID NO: 1612 - DNA, 17 bp, Homo sapiens
gattatgagctctttta

SEQ ID NO: 1613 - DNA, 17 bp, Homo sapiens
attatgagctcttttag

SEQ ID NO: 1614 - DNA, 17 bp, Homo sapiens
ttatgagctcttttagg

SEQ ID NO: 1615 - DNA, 17 bp, Homo sapiens
tatgagctcttttaggt

SEQ ID NO: 1616 - DNA, 17 bp, Homo sapiens
atgagctcttttaggtc

SEQ ID NO: 1617 - DNA, 17 bp, Homo sapiens
tgagctcttttaggtcc

SEQ ID NO: 1618 - DNA, 17 bp, Homo sapiens
gagctcttttaggtccg

SEQ ID NO: 1619 - DNA, 17 bp, Homo sapiens
agctcttttaggtccgt

SEQ ID NO: 1620 - DNA, 17 bp, Homo sapiens
gctcttttaggtccgta

SEQ ID NO: 1621 - DNA, 17 bp, Homo sapiens
ctcttttaggtccgtac

SEQ ID NO: 1622 - DNA, 17 bp, Homo sapiens
tcttttaggtccgtaca

SEQ ID NO: 1623 - DNA, 17 bp, Homo sapiens
cttttaggtccgtacaa

SEQ ID NO: 1624 - DNA, 17 bp, Homo sapiens
ttttaggtccgtacaat

SEQ ID NO: 1625 - DNA, 17 bp, Homo sapiens
tttaggtccgtacaatg

SEQ ID NO: 1626 - DNA, 17 bp, Homo sapiens
ttaggtccgtacaatgt

SEQ ID NO: 1627 - DNA, 17 bp, Homo sapiens
taggtccgtacaatgtt

SEQ ID NO: 1628 - DNA, 17 bp, Homo sapiens
aggtccgtacaatgttt

SEQ ID NO: 1629 - DNA, 17 bp, Homo sapiens
ggtccgtacaatgtttt

SEQ ID NO: 1630 - DNA, 17 bp, Homo sapiens
gtccgtacaatgttttt

SEQ ID NO: 1631 - DNA, 17 bp, Homo sapiens
tccgtacaatgtttttg

SEQ ID NO: 1632 - DNA, 17 bp, Homo sapiens
ccgtacaatgtttttgc

SEQ ID NO: 1633 - DNA, 17 bp, Homo sapiens
cgtacaatgtttttgca

SEQ ID NO: 1634 - DNA, 17 bp, Homo sapiens
gtacaatgtttttgcat

SEQ ID NO: 1635 - DNA, 17 bp, Homo sapiens
tacaatgtttttgcatc

SEQ ID NO: 1636 - DNA, 17 bp, Homo sapiens
acaatgtttttgcatct

SEQ ID NO: 1637 - DNA, 17 bp, Homo sapiens
caatgtttttgcatcta

SEQ ID NO: 1638 - DNA, 17 bp, Homo sapiens
aatgtttttgcatctat

SEQ ID NO: 1639 - DNA, 17 bp, Homo sapiens
atgtttttgcatctata

SEQ ID NO: 1640 - DNA, 17 bp, Homo sapiens
tgtttttgcatctatac

SEQ ID NO: 1641 - DNA, 17 bp, Homo sapiens
gtttttgcatctataca

SEQ ID NO: 1642 - DNA, 17 bp, Homo sapiens
tttttgcatctatacag

SEQ ID NO: 1643 - DNA, 17 bp, Homo sapiens
ttttgcatctatacagg

SEQ ID NO: 1644 - DNA, 17 bp, Homo sapiens
tttgcatctatacagga

SEQ ID NO: 1645 - DNA, 17 bp, Homo sapiens
ttgcatctatacaggaa

SEQ ID NO: 1646 - DNA, 17 bp, Homo sapiens
tgcatctatacaggaac

SEQ ID NO: 1647 - DNA, 17 bp, Homo sapiens
gcatctatacaggaacg

SEQ ID NO: 1648 - DNA, 17 bp, Homo sapiens
catctatacaggaacga

SEQ ID NO: 1649 - DNA, 17 bp, Homo sapiens
atctatacaggaacgac

SEQ ID NO: 1650 - DNA, 17 bp, Homo sapiens
tctatacaggaacgacc

SEQ ID NO: 1651 - DNA, 17 bp, Homo sapiens
ctatacaggaacgaccc

SEQ ID NO: 1652 - DNA, 17 bp, Homo sapiens
tatacaggaacgaccct

SEQ ID NO: 1653 - DNA, 17 bp, Homo sapiens
atacaggaacgaccctg

SEQ ID NO: 1654 - DNA, 17 bp, Homo sapiens
tacaggaacgaccctgt

SEQ ID NO: 1655 - DNA, 17 bp, Homo sapiens
acaggaacgaccctgtt

SEQ ID NO: 1656 - DNA, 17 bp, Homo sapiens
caggaacgaccctgtta

SEQ ID NO: 1657 - DNA, 17 bp, Homo sapiens
aggaacgaccctgttat

SEQ ID NO: 1658 - DNA, 17 bp, Homo sapiens
ggaacgaccctgttatt

SEQ ID NO: 1659 - DNA, 17 bp, Homo sapiens
gaacgaccctgttattt

SEQ ID NO: 1660 - DNA, 17 bp, Homo sapiens
aacgaccctgttatttt

SEQ ID NO: 1661 - DNA, 17 bp, Homo sapiens
acgaccctgttattttg

SEQ ID NO: 1662 - DNA, 17 bp, Homo sapiens
cgaccctgttattttgc

SEQ ID NO: 1663 - DNA, 17 bp, Homo sapiens
gaccctgttattttgct

SEQ ID NO: 1664 - DNA, 17 bp, Homo sapiens
accctgttattttgcta

SEQ ID NO: 1665 - DNA, 17 bp, Homo sapiens
ccctgttattttgctat

SEQ ID NO: 1666 - DNA, 17 bp, Homo sapiens
cctgttattttgctatt

SEQ ID NO: 1667 - DNA, 17 bp, Homo sapiens
ctgttattttgctattt

SEQ ID NO: 1668 - DNA, 17 bp, Homo sapiens
tgttattttgctatttt

SEQ ID NO: 1669 - DNA, 17 bp, Homo sapiens
gttattttgctattttt

SEQ ID NO: 1670 - DNA, 17 bp, Homo sapiens
ttattttgctattttta

SEQ ID NO: 1671 - DNA, 17 bp, Homo sapiens
tattttgctatttttat

SEQ ID NO: 1672 - DNA, 17 bp, Homo sapiens
attttgctatttttata

SEQ ID NO: 1673 - DNA, 17 bp, Homo sapiens
ttttgctatttttataa

SEQ ID NO: 1674 - DNA, 17 bp, Homo sapiens
tttgctatttttataac

SEQ ID NO: 1675 - DNA, 17 bp, Homo sapiens
ttgctatttttataaca

SEQ ID NO: 1676 - DNA, 17 bp, Homo sapiens
tgctatttttataacat

SEQ ID NO: 1677 - DNA, 17 bp, Homo sapiens
gctatttttataacatc

SEQ ID NO: 1678 - DNA, 17 bp, Homo sapiens
ctatttttataacatca

SEQ ID NO: 1679 - DNA, 17 bp, Homo sapiens
tatttttataacatcac

SEQ ID NO: 1680 - DNA, 17 bp, Homo sapiens
atttttataacatcacg

SEQ ID NO: 1681 - DNA, 17 bp, Homo sapiens
tttttataacatcacgt

SEQ ID NO: 1682 - DNA, 17 bp, Homo sapiens
ttttataacatcacgtg

SEQ ID NO: 1683 - DNA, 17 bp, Homo sapiens
tttataacatcacgtgt

SEQ ID NO: 1684 - DNA, 17 bp, Homo sapiens
ttataacatcacgtgtt

SEQ ID NO: 1685 - DNA, 17 bp, Homo sapiens
tataacatcacgtgttt

SEQ ID NO: 1686 - DNA, 17 bp, Homo sapiens
ataacatcacgtgtttt

SEQ ID NO: 1687 - DNA, 17 bp, Homo sapiens
taacatcacgtgttttg

SEQ ID NO: 1688 - DNA, 17 bp, Homo sapiens
aacatcacgtgttttgg

SEQ ID NO: 1689 - DNA, 17 bp, Homo sapiens
acatcacgtgttttgga

SEQ ID NO: 1690 - DNA, 17 bp, Homo sapiens
catcacgtgttttggag

SEQ ID NO: 1691 - DNA, 17 bp, Homo sapiens
atcacgtgttttggagc

SEQ ID NO: 1692 - DNA, 17 bp, Homo sapiens
tcacgtgttttggagca

SEQ ID NO: 1693 - DNA, 17 bp, Homo sapiens
cacgtgttttggagcat

SEQ ID NO: 1694 - DNA, 17 bp, Homo sapiens
acgtgttttggagcatt

SEQ ID NO: 1695 - DNA, 17 bp, Homo sapiens
cgtgttttggagcattt

SEQ ID NO: 1696 - DNA, 17 bp, Homo sapiens
gtgttttggagcattta

SEQ ID NO: 1697 - DNA, 17 bp, Homo sapiens
tgttttggagcatttat

SEQ ID NO: 1698 - DNA, 17 bp, Homo sapiens
gttttggagcatttatg

SEQ ID NO: 1699 - DNA, 17 bp, Homo sapiens
ttttggagcatttatgg

SEQ ID NO: 1700 - DNA, 17 bp, Homo sapiens
tttggagcatttatggc

SEQ ID NO: 1701 - DNA, 17 bp, Homo sapiens
ttggagcatttatggcc

SEQ ID NO: 1702 - DNA, 17 bp, Homo sapiens
tggagcatttatggcct

SEQ ID NO: 1703 - DNA, 17 bp, Homo sapiens
ggagcatttatggcctt

SEQ ID NO: 1704 - DNA, 17 bp, Homo sapiens
gagcatttatggccttg

SEQ ID NO: 1705 - DNA, 17 bp, Homo sapiens
agcatttatggccttgg

SEQ ID NO: 1706 - DNA, 17 bp, Homo sapiens
gcatttatggccttgga

SEQ ID NO: 1707 - DNA, 17 bp, Homo sapiens
catttatggccttggat

SEQ ID NO: 1708 - DNA, 17 bp, Homo sapiens
atttatggccttggatg

SEQ ID NO: 1709 - DNA, 17 bp, Homo sapiens
tttatggccttggatgg

SEQ ID NO: 1710 - DNA, 17 bp, Homo sapiens
ttatggccttggatggt

SEQ ID NO: 1711 - DNA, 17 bp, Homo sapiens
tatggccttggatggta

SEQ ID NO: 1712 - DNA, 17 bp, Homo sapiens
atggccttggatggtaa

SEQ ID NO: 1713 - DNA, 17 bp, Homo sapiens
tggccttggatggtaaa

SEQ ID NO: 1714 - DNA, 17 bp, Homo sapiens
ggccttggatggtaaaa

SEQ ID NO: 1715 - DNA, 17 bp, Homo sapiens
gccttggatggtaaaag

SEQ ID NO: 1716 - DNA, 17 bp, Homo sapiens
ccttggatggtaaaaga

SEQ ID NO: 1717 - DNA, 17 bp, Homo sapiens
cttggatggtaaaagag

SEQ ID NO: 1718 - DNA, 17 bp, Homo sapiens
ttggatggtaaaagaga

SEQ ID NO: 1719 - DNA, 17 bp, Homo sapiens
tggatggtaaaagagaa

SEQ ID NO: 1720 - DNA, 17 bp, Homo sapiens
ggatggtaaaagagaag

SEQ ID NO: 1721 - DNA, 17 bp, Homo sapiens
gatggtaaaagagaagt

SEQ ID NO: 1722 - DNA, 17 bp, Homo sapiens
atggtaaaagagaagta

SEQ ID NO: 1723 - DNA, 17 bp, Homo sapiens
tggtaaaagagaagtag

SEQ ID NO: 1724 - DNA, 17 bp, Homo sapiens
ggtaaaagagaagtagt

SEQ ID NO: 1725 - DNA, 17 bp, Homo sapiens
gtaaaagagaagtagtc

SEQ ID NO: 1726 - DNA, 17 bp, Homo sapiens
taaaagagaagtagtct

SEQ ID NO: 1727 - DNA, 17 bp, Homo sapiens
aaaagagaagtagtctg

SEQ ID NO: 1728 - DNA, 17 bp, Homo sapiens
aaagagaagtagtctgc

SEQ ID NO: 1729 - DNA, 17 bp, Homo sapiens
aagagaagtagtctgcc

SEQ ID NO: 1730 - DNA, 17 bp, Homo sapiens
agagaagtagtctgcct

SEQ ID NO: 1731 - DNA, 17 bp, Homo sapiens
gagaagtagtctgccta

SEQ ID NO: 1732 - DNA, 17 bp, Homo sapiens
agaagtagtctgcctat

SEQ ID NO: 1733 - DNA, 17 bp, Homo sapiens
gaagtagtctgcctatg

SEQ ID NO: 1734 - DNA, 17 bp, Homo sapiens
aagtagtctgcctatgc

SEQ ID NO: 1735 - DNA, 17 bp, Homo sapiens
agtagtctgcctatgct

SEQ ID NO: 1736 - DNA, 17 bp, Homo sapiens
gtagtctgcctatgctg

SEQ ID NO: 1737 - DNA, 17 bp, Homo sapiens
tagtctgcctatgctgg

SEQ ID NO: 1738 - DNA, 17 bp, Homo sapiens
agtctgcctatgctggt

SEQ ID NO: 1739 - DNA, 17 bp, Homo sapiens
gtctgcctatgctggtt

SEQ ID NO: 1740 - DNA, 17 bp, Homo sapiens
tctgcctatgctggttg

SEQ ID NO: 1741 - DNA, 17 bp, Homo sapiens
ctgcctatgctggttga

SEQ ID NO: 1742 - DNA, 17 bp, Homo sapiens
tgcctatgctggttgaa

SEQ ID NO: 1743 - DNA, 17 bp, Homo sapiens
gcctatgctggttgaaa

SEQ ID NO: 1744 - DNA, 17 bp, Homo sapiens
cctatgctggttgaaaa

SEQ ID NO: 1745 - DNA, 17 bp, Homo sapiens
ctatgctggttgaaaaa

SEQ ID NO: 1746 - DNA, 17 bp, Homo sapiens
tatgctggttgaaaaag

SEQ ID NO: 1747 - DNA, 17 bp, Homo sapiens
atgctggttgaaaaagg

SEQ ID NO: 1748 - DNA, 17 bp, Homo sapiens
tgctggttgaaaaaggc

SEQ ID NO: 1749 - DNA, 17 bp, Homo sapiens
gctggttgaaaaaggct

SEQ ID NO: 1750 - DNA, 17 bp, Homo sapiens
ctggttgaaaaaggctg

SEQ ID NO: 1751 - DNA, 17 bp, Homo sapiens
tggttgaaaaaggctga

SEQ ID NO: 1752 - DNA, 17 bp, Homo sapiens
ggttgaaaaaggctgac

SEQ ID NO: 1753 - DNA, 17 bp, Homo sapiens
gttgaaaaaggctgacc

SEQ ID NO: 1754 - DNA, 17 bp, Homo sapiens
ttgaaaaaggctgaccc

SEQ ID NO: 1755 - DNA, 17 bp, Homo sapiens
tgaaaaaggctgaccca

SEQ ID NO: 1756 - DNA, 17 bp, Homo sapiens
gaaaaaggctgacccaa

SEQ ID NO: 1757 - DNA, 17 bp, Homo sapiens
aaaaaggctgacccaaa

SEQ ID NO: 1758 - DNA, 17 bp, Homo sapiens
aaaaggctgacccaaaa

SEQ ID NO: 1759 - DNA, 17 bp, Homo sapiens
aaaggctgacccaaaat

SEQ ID NO: 1760 - DNA, 17 bp, Homo sapiens
aaggctgacccaaaatg

SEQ ID NO: 1761 - DNA, 17 bp, Homo sapiens
aggctgacccaaaatgg

SEQ ID NO: 1762 - DNA, 17 bp, Homo sapiens
ggctgacccaaaatggc

SEQ ID NO: 1763 - DNA, 17 bp, Homo sapiens
gctgacccaaaatggcc

SEQ ID NO: 1764 - DNA, 17 bp, Homo sapiens
ctgacccaaaatggccc

SEQ ID NO: 1765 - DNA, 17 bp, Homo sapiens
tgacccaaaatggccct

SEQ ID NO: 1766 - DNA, 17 bp, Homo sapiens
gacccaaaatggccctc

SEQ ID NO: 1767 - DNA, 17 bp, Homo sapiens
acccaaaatggccctca

SEQ ID NO: 1768 - DNA, 17 bp, Homo sapiens
cccaaaatggccctcat

SEQ ID NO: 1769 - DNA, 17 bp, Homo sapiens
ccaaaatggccctcatt

SEQ ID NO: 1770 - DNA, 17 bp, Homo sapiens
caaaatggccctcattt

SEQ ID NO: 1771 - DNA, 17 bp, Homo sapiens
aaaatggccctcattta

SEQ ID NO: 1772 - DNA, 17 bp, Homo sapiens
aaatggccctcatttaa

SEQ ID NO: 1773 - DNA, 17 bp, Homo sapiens
aatggccctcatttaaa

SEQ ID NO: 1774 - DNA, 17 bp, Homo sapiens
atggccctcatttaaaa

SEQ ID NO: 1775 - DNA, 17 bp, Homo sapiens
tggccctcatttaaaaa

SEQ ID NO: 1776 - DNA, 17 bp, Homo sapiens
ggccctcatttaaaaag

SEQ ID NO: 1777 - DNA, 17 bp, Homo sapiens
gccctcatttaaaaagt

SEQ ID NO: 1778 - DNA, 17 bp, Homo sapiens
ccctcatttaaaaagtt

SEQ ID NO: 1779 - DNA, 17 bp, Homo sapiens
cctcatttaaaaagttc

SEQ ID NO: 1780 - DNA, 17 bp, Homo sapiens
ctcatttaaaaagttct

SEQ ID NO: 1781 - DNA, 17 bp, Homo sapiens
tcatttaaaaagttctg

SEQ ID NO: 1782 - DNA, 17 bp, Homo sapiens
catttaaaaagttctgc

SEQ ID NO: 1783 - DNA, 17 bp, Homo sapiens
atttaaaaagttctgct

SEQ ID NO: 1784 - DNA, 17 bp, Homo sapiens
tttaaaaagttctgctg

SEQ ID NO: 1785 - DNA, 17 bp, Homo sapiens
ttaaaaagttctgctgt

SEQ ID NO: 1786 - DNA, 17 bp, Homo sapiens
taaaaagttctgctgtt

SEQ ID NO: 1787 - DNA, 17 bp, Homo sapiens
aaaaagttctgctgttt

SEQ ID NO: 1788 - DNA, 17 bp, Homo sapiens
aaaagttctgctgtttc

SEQ ID NO: 1789 - DNA, 17 bp, Homo sapiens
aaagttctgctgtttcc

SEQ ID NO: 1790 - DNA, 17 bp, Homo sapiens
aagttctgctgtttccc

SEQ ID NO: 1791 - DNA, 17 bp, Homo sapiens
agttctgctgtttccca

SEQ ID NO: 1792 - DNA, 17 bp, Homo sapiens
gttctgctgtttcccat

SEQ ID NO: 1793 - DNA, 17 bp, Homo sapiens
ttctgctgtttcccatt

SEQ ID NO: 1794 - DNA, 17 bp, Homo sapiens
tctgctgtttcccattt

SEQ ID NO: 1795 - DNA, 17 bp, Homo sapiens
ctgctgtttcccatttg

SEQ ID NO: 1796 - DNA, 17 bp, Homo sapiens
tgctgtttcccatttgg

SEQ ID NO: 1797 - DNA, 17 bp, Homo sapiens
gctgtttcccatttggt

SEQ ID NO: 1798 - DNA, 17 bp, Homo sapiens
ctgtttcccatttggtt

SEQ ID NO: 1799 - DNA, 17 bp, Homo sapiens
tgtttcccatttggttc

SEQ ID NO: 1800 - DNA, 17 bp, Homo sapiens
gtttcccatttggttct

SEQ ID NO: 1801 - DNA, 17 bp, Homo sapiens
tttcccatttggttctg

SEQ ID NO: 1802 - DNA, 17 bp, Homo sapiens
ttcccatttggttctgt

SEQ ID NO: 1803 - DNA, 17 bp, Homo sapiens
tcccatttggttctgtc

SEQ ID NO: 1804 - DNA, 17 bp, Homo sapiens
cccatttggttctgtcc

SEQ ID NO: 1805 - DNA, 17 bp, Homo sapiens
ccatttggttctgtccc

SEQ ID NO: 1806 - DNA, 17 bp, Homo sapiens
catttggttctgtccca

SEQ ID NO: 1807 - DNA, 17 bp, Homo sapiens
atttggttctgtcccag

SEQ ID NO: 1808 - DNA, 17 bp, Homo sapiens
tttggttctgtcccaga

SEQ ID NO: 1809 - DNA, 17 bp, Homo sapiens
ttggttctgtcccagat

SEQ ID NO: 1810 - DNA, 17 bp, Homo sapiens
tggttctgtcccagatg

SEQ ID NO: 1811 - DNA, 17 bp, Homo sapiens
ggttctgtcccagatga

SEQ ID NO: 1812 - DNA, 17 bp, Homo sapiens
gttctgtcccagatgaa

SEQ ID NO: 1813 - DNA, 17 bp, Homo sapiens
ttctgtcccagatgaac

SEQ ID NO: 1814 - DNA, 17 bp, Homo sapiens
tctgtcccagatgaaca

SEQ ID NO: 1815 - DNA, 17 bp, Homo sapiens
ctgtcccagatgaacat

SEQ ID NO: 1816 - DNA, 17 bp, Homo sapiens
tgtcccagatgaacatg

SEQ ID NO: 1817 - DNA, 17 bp, Homo sapiens
gtcccagatgaacatgg

SEQ ID NO: 1818 - DNA, 17 bp, Homo sapiens
tcccagatgaacatgga

SEQ ID NO: 1819 - DNA, 17 bp, Homo sapiens
cccagatgaacatggaa

SEQ ID NO: 1820 - DNA, 17 bp, Homo sapiens
ccagatgaacatggaac

SEQ ID NO: 1821 - DNA, 17 bp, Homo sapiens
cagatgaacatggaact

SEQ ID NO: 1822 - DNA, 17 bp, Homo sapiens
agatgaacatggaactg

SEQ ID NO: 1823 - DNA, 17 bp, Homo sapiens
gatgaacatggaactga

SEQ ID NO: 1824 - DNA, 17 bp, Homo sapiens
atgaacatggaactgat

SEQ ID NO: 1825 - DNA, 17 bp, Homo sapiens
tgaacatggaactgata

SEQ ID NO: 1826 - DNA, 17 bp, Homo sapiens
gaacatggaactgatat

SEQ ID NO: 1827 - DNA, 17 bp, Homo sapiens
aacatggaactgatatc

SEQ ID NO: 1828 - DNA, 17 bp, Homo sapiens
acatggaactgatatcc

SEQ ID NO: 1829 - DNA, 17 bp, Homo sapiens
catggaactgatatcca

SEQ ID NO: 1830 - DNA, 17 bp, Homo sapiens
atggaactgatatccat

SEQ ID NO: 1831 - DNA, 17 bp, Homo sapiens
tggaactgatatccatc

SEQ ID NO: 1832 - DNA, 17 bp, Homo sapiens
ggaactgatatccatcc

SEQ ID NO: 1833 - DNA, 17 bp, Homo sapiens
gaactgatatccatcca

SEQ ID NO: 1834 - DNA, 17 bp, Homo sapiens
aactgatatccatccaa

SEQ ID NO: 1835 - DNA, 17 bp, Homo sapiens
actgatatccatccaat

SEQ ID NO: 1836 - DNA, 17 bp, Homo sapiens
ctgatatccatccaatg

SEQ ID NO: 1837 - DNA, 17 bp, Homo sapiens
tgatatccatccaatga

SEQ ID NO: 1838 - DNA, 17 bp, Homo sapiens
gatatccatccaatgag

SEQ ID NO: 1839 - DNA, 17 bp, Homo sapiens
atatccatccaatgagt

SEQ ID NO: 1840 - DNA, 17 bp, Homo sapiens
tatccatccaatgagtt

SEQ ID NO: 1841 - DNA, 17 bp, Homo sapiens
atccatccaatgagttt

SEQ ID NO: 1842 - DNA, 17 bp, Homo sapiens
tccatccaatgagtttg

SEQ ID NO: 1843 - DNA, 17 bp, Homo sapiens
ccatccaatgagtttgt

SEQ ID NO: 1844 - DNA, 17 bp, Homo sapiens
catccaatgagtttgtt

SEQ ID NO: 1845 - DNA, 17 bp, Homo sapiens
atccaatgagtttgttt

SEQ ID NO: 1846 - DNA, 17 bp, Homo sapiens
tccaatgagtttgtttt

SEQ ID NO: 1847 - DNA, 17 bp, Homo sapiens
ccaatgagtttgttttt

SEQ ID NO: 1848 - DNA, 17 bp, Homo sapiens
caatgagtttgtttttt

SEQ ID NO: 1849 - DNA, 17 bp, Homo sapiens
aatgagtttgtttttta

SEQ ID NO: 1850 - DNA, 17 bp, Homo sapiens
atgagtttgttttttag

SEQ ID NO: 1851 - DNA, 17 bp, Homo sapiens
tgagtttgttttttaga

SEQ ID NO: 1852 - DNA, 17 bp, Homo sapiens
gagtttgttttttagag

SEQ ID NO: 1853 - DNA, 17 bp, Homo sapiens
agtttgttttttagaga

SEQ ID NO: 1854 - DNA, 17 bp, Homo sapiens
gtttgttttttagagac

SEQ ID NO: 1855 - DNA, 17 bp, Homo sapiens
tttgttttttagagact

SEQ ID NO: 1856 - DNA, 17 bp, Homo sapiens
ttgttttttagagacta

SEQ ID NO: 1857 - DNA, 17 bp, Homo sapiens
tgttttttagagactat

SEQ ID NO: 1858 - DNA, 17 bp, Homo sapiens
gttttttagagactatt

SEQ ID NO: 1859 - DNA, 17 bp, Homo sapiens
ttttttagagactattt

SEQ ID NO: 1860 - DNA, 17 bp, Homo sapiens
tttttagagactatttt

SEQ ID NO: 1861 - DNA, 17 bp, Homo sapiens
ttttagagactattttg

SEQ ID NO: 1862 - DNA, 17 bp, Homo sapiens
tttagagactattttgg

SEQ ID NO: 1863 - DNA, 17 bp, Homo sapiens
ttagagactattttggc

SEQ ID NO: 1864 - DNA, 17 bp, Homo sapiens
tagagactattttggcc

SEQ ID NO: 1865 - DNA, 17 bp, Homo sapiens
agagactattttggccc

SEQ ID NO: 1866 - DNA, 17 bp, Homo sapiens
gagactattttggcccc

SEQ ID NO: 1867 - DNA, 17 bp, Homo sapiens
agactattttggcccct

SEQ ID NO: 1868 - DNA, 17 bp, Homo sapiens
gactattttggcccctt

SEQ ID NO: 1869 - DNA, 17 bp, Homo sapiens
actattttggccccttt

SEQ ID NO: 1870 - DNA, 17 bp, Homo sapiens
ctattttggcccctttc

SEQ ID NO: 1871 - DNA, 17 bp, Homo sapiens
tattttggcccctttct

SEQ ID NO: 1872 - DNA, 17 bp, Homo sapiens
attttggcccctttctc

SEQ ID NO: 1873 - DNA, 17 bp, Homo sapiens
ttttggcccctttctca

SEQ ID NO: 1874 - DNA, 17 bp, Homo sapiens
tttggcccctttctcac

SEQ ID NO: 1875 - DNA, 17 bp, Homo sapiens
ttggcccctttctcaca

SEQ ID NO: 1876 - DNA, 17 bp, Homo sapiens
tggcccctttctcacaa

SEQ ID NO: 1877 - DNA, 17 bp, Homo sapiens
ggcccctttctcacaag

SEQ ID NO: 1878 - DNA, 17 bp, Homo sapiens
gcccctttctcacaagg

SEQ ID NO: 1879 - DNA, 17 bp, Homo sapiens
cccctttctcacaagga

SEQ ID NO: 1880 - DNA, 17 bp, Homo sapiens
ccctttctcacaaggag

SEQ ID NO: 1881 - DNA, 17 bp, Homo sapiens
cctttctcacaaggagt

SEQ ID NO: 1882 - DNA, 17 bp, Homo sapiens
ctttctcacaaggagtg

SEQ ID NO: 1883 - DNA, 17 bp, Homo sapiens
tttctcacaaggagtga

SEQ ID NO: 1884 - DNA, 17 bp, Homo sapiens
ttctcacaaggagtgag

SEQ ID NO: 1885 - DNA, 17 bp, Homo sapiens
tctcacaaggagtgagt

SEQ ID NO: 1886 - DNA, 17 bp, Homo sapiens
ctcacaaggagtgagtc

SEQ ID NO: 1887 - DNA, 17 bp, Homo sapiens
tcacaaggagtgagtcc

SEQ ID NO: 1888 - DNA, 17 bp, Homo sapiens
cacaaggagtgagtcca

SEQ ID NO: 1889 - DNA, 17 bp, Homo sapiens
acaaggagtgagtccaa

SEQ ID NO: 1890 - DNA, 17 bp, Homo sapiens
caaggagtgagtccaag

SEQ ID NO: 1891 - DNA, 17 bp, Homo sapiens
aaggagtgagtccaagt

SEQ ID NO: 1892 - DNA, 17 bp, Homo sapiens
aggagtgagtccaagta

SEQ ID NO: 1893 - DNA, 17 bp, Homo sapiens
ggagtgagtccaagtat

SEQ ID NO: 1894 - DNA, 17 bp, Homo sapiens
gagtgagtccaagtatt

SEQ ID NO: 1895 - DNA, 17 bp, Homo sapiens
agtgagtccaagtattt

SEQ ID NO: 1896 - DNA, 17 bp, Homo sapiens
gtgagtccaagtatttt

SEQ ID NO: 1897 - DNA, 17 bp, Homo sapiens
tgagtccaagtattttg

SEQ ID NO: 1898 - DNA, 17 bp, Homo sapiens
gagtccaagtattttgt

SEQ ID NO: 1899 - DNA, 17 bp, Homo sapiens
agtccaagtattttgta

SEQ ID NO: 1900 - DNA, 17 bp, Homo sapiens
gtccaagtattttgtag

SEQ ID NO: 1901 - DNA, 17 bp, Homo sapiens
tccaagtattttgtagt

SEQ ID NO: 1902 - DNA, 17 bp, Homo sapiens
ccaagtattttgtagtc

SEQ ID NO: 1903 - DNA, 17 bp, Homo sapiens
caagtattttgtagtct

SEQ ID NO: 1904 - DNA, 17 bp, Homo sapiens
aagtattttgtagtctt

SEQ ID NO: 1905 - DNA, 17 bp, Homo sapiens
agtattttgtagtcttt

SEQ ID NO: 1906 - DNA, 17 bp, Homo sapiens
gtattttgtagtcttta

SEQ ID NO: 1907 - DNA, 17 bp, Homo sapiens
tattttgtagtctttat

SEQ ID NO: 1908 - DNA, 17 bp, Homo sapiens
attttgtagtctttata

SEQ ID NO: 1909 - DNA, 17 bp, Homo sapiens
ttttgtagtctttatat

SEQ ID NO: 1910 - DNA, 17 bp, Homo sapiens
tttgtagtctttatata

SEQ ID NO: 1911 - DNA, 17 bp, Homo sapiens
ttgtagtctttatatat

SEQ ID NO: 1912 - DNA, 17 bp, Homo sapiens
tgtagtctttatatatg

SEQ ID NO: 1913 - DNA, 17 bp, Homo sapiens
gtagtctttatatatgt

SEQ ID NO: 1914 - DNA, 17 bp, Homo sapiens
tagtctttatatatgtt

SEQ ID NO: 1915 - DNA, 17 bp, Homo sapiens
agtctttatatatgttt

SEQ ID NO: 1916 - DNA, 17 bp, Homo sapiens
gtctttatatatgtttt

SEQ ID NO: 1917 - DNA, 17 bp, Homo sapiens
tctttatatatgttttg

SEQ ID NO: 1918 - DNA, 17 bp, Homo sapiens
ctttatatatgttttgt

SEQ ID NO: 1919 - DNA, 17 bp, Homo sapiens
tttatatatgttttgta

SEQ ID NO: 1920 - DNA, 17 bp, Homo sapiens
ttatatatgttttgtac

SEQ ID NO: 1921 - DNA, 17 bp, Homo sapiens
tatatatgttttgtaca

SEQ ID NO: 1922 - DNA, 17 bp, Homo sapiens
atatatgttttgtacat

SEQ ID NO: 1923 - DNA, 17 bp, Homo sapiens
tatatgttttgtacatc

SEQ ID NO: 1924 - DNA, 17 bp, Homo sapiens
atatgttttgtacatca

SEQ ID NO: 1925 - DNA, 17 bp, Homo sapiens
tatgttttgtacatcat

SEQ ID NO: 1926 - DNA, 17 bp, Homo sapiens
atgttttgtacatcata

SEQ ID NO: 1927 - DNA, 17 bp, Homo sapiens
tgttttgtacatcataa

SEQ ID NO: 1928 - DNA, 17 bp, Homo sapiens
gttttgtacatcataag

SEQ ID NO: 1929 - DNA, 17 bp, Homo sapiens
ttttgtacatcataagc

SEQ ID NO: 1930 - DNA, 17 bp, Homo sapiens
tttgtacatcataagca

SEQ ID NO: 1931 - DNA, 17 bp, Homo sapiens
ttgtacatcataagcag

SEQ ID NO: 1932 - DNA, 17 bp, Homo sapiens
tgtacatcataagcagt

SEQ ID NO: 1933 - DNA, 17 bp, Homo sapiens
gtacatcataagcagta

SEQ ID NO: 1934 - DNA, 17 bp, Homo sapiens
tacatcataagcagtat

SEQ ID NO: 1935 - DNA, 17 bp, Homo sapiens
acatcataagcagtata

SEQ ID NO: 1936 - DNA, 17 bp, Homo sapiens
catcataagcagtatat

SEQ ID NO: 1937 - DNA, 17 bp, Homo sapiens
atcataagcagtatata

SEQ ID NO: 1938 - DNA, 17 bp, Homo sapiens
tcataagcagtatatat

SEQ ID NO: 1939 - DNA, 17 bp, Homo sapiens
cataagcagtatatatg

SEQ ID NO: 1940 - DNA, 17 bp, Homo sapiens
ataagcagtatatatgg

SEQ ID NO: 1941 - DNA, 17 bp, Homo sapiens
taagcagtatatatggg

SEQ ID NO: 1942 - DNA, 17 bp, Homo sapiens
aagcagtatatatgggt

SEQ ID NO: 1943 - DNA, 17 bp, Homo sapiens
agcagtatatatgggtg

SEQ ID NO: 1944 - DNA, 17 bp, Homo sapiens
gcagtatatatgggtgt

SEQ ID NO: 1945 - DNA, 17 bp, Homo sapiens
cagtatatatgggtgtt

SEQ ID NO: 1946 - DNA, 17 bp, Homo sapiens
agtatatatgggtgttt

SEQ ID NO: 1947 - DNA, 17 bp, Homo sapiens
gtatatatgggtgtttc

SEQ ID NO: 1948 - DNA, 17 bp, Homo sapiens
tatatatgggtgtttcc

SEQ ID NO: 1949 - DNA, 17 bp, Homo sapiens
atatatgggtgtttcca

SEQ ID NO: 1950 - DNA, 17 bp, Homo sapiens
tatatgggtgtttccat

SEQ ID NO: 1951 - DNA, 17 bp, Homo sapiens
atatgggtgtttccatg

SEQ ID NO: 1952 - DNA, 17 bp, Homo sapiens
tatgggtgtttccatgt

SEQ ID NO: 1953 - DNA, 17 bp, Homo sapiens
atgggtgtttccatgtg

SEQ ID NO: 1954 - DNA, 17 bp, Homo sapiens
tgggtgtttccatgtgc

SEQ ID NO: 1955 - DNA, 17 bp, Homo sapiens
gggtgtttccatgtgca

SEQ ID NO: 1956 - DNA, 17 bp, Homo sapiens
ggtgtttccatgtgcag

SEQ ID NO: 1957 - DNA, 17 bp, Homo sapiens
gtgtttccatgtgcagg

SEQ ID NO: 1958 - DNA, 17 bp, Homo sapiens
tgtttccatgtgcagga

SEQ ID NO: 1959 - DNA, 17 bp, Homo sapiens
gtttccatgtgcaggaa

SEQ ID NO: 1960 - DNA, 17 bp, Homo sapiens
tttccatgtgcaggaag

SEQ ID NO: 1961 - DNA, 17 bp, Homo sapiens
ttccatgtgcaggaagg

SEQ ID NO: 1962 - DNA, 17 bp, Homo sapiens
tccatgtgcaggaaggt

SEQ ID NO: 1963 - DNA, 17 bp, Homo sapiens
ccatgtgcaggaaggtt

SEQ ID NO: 1964 - DNA, 17 bp, Homo sapiens
catgtgcaggaaggttt

SEQ ID NO: 1965 - DNA, 17 bp, Homo sapiens
atgtgcaggaaggttta

SEQ ID NO: 1966 - DNA, 17 bp, Homo sapiens
tgtgcaggaaggtttag

SEQ ID NO: 1967 - DNA, 17 bp, Homo sapiens
gtgcaggaaggtttaga

SEQ ID NO: 1968 - DNA, 17 bp, Homo sapiens
tgcaggaaggtttagac

SEQ ID NO: 1969 - DNA, 17 bp, Homo sapiens
gcaggaaggtttagacc

SEQ ID NO: 1970 - DNA, 17 bp, Homo sapiens
caggaaggtttagacct

SEQ ID NO: 1971 - DNA, 17 bp, Homo sapiens
aggaaggtttagacctt

SEQ ID NO: 1972 - DNA, 17 bp, Homo sapiens
ggaaggtttagaccttc

SEQ ID NO: 1973 - DNA, 17 bp, Homo sapiens
gaaggtttagaccttcg

SEQ ID NO: 1974 - DNA, 17 bp, Homo sapiens
aaggtttagaccttcga

SEQ ID NO: 1975 - DNA, 17 bp, Homo sapiens
aggtttagaccttcgaa

SEQ ID NO: 1976 - DNA, 17 bp, Homo sapiens
ggtttagaccttcgaaa

SEQ ID NO: 1977 - DNA, 17 bp, Homo sapiens
gtttagaccttcgaaat

SEQ ID NO: 1978 - DNA, 17 bp, Homo sapiens
tttagaccttcgaaatc

SEQ ID NO: 1979 - DNA, 17 bp, Homo sapiens
ttagaccttcgaaatct

SEQ ID NO: 1980 - DNA, 17 bp, Homo sapiens
tagaccttcgaaatctg

SEQ ID NO: 1981 - DNA, 17 bp, Homo sapiens
agaccttcgaaatctgg

SEQ ID NO: 1982 - DNA, 17 bp, Homo sapiens
gaccttcgaaatctggc

SEQ ID NO: 1983 - DNA, 17 bp, Homo sapiens
accttcgaaatctggca

SEQ ID NO: 1984 - DNA, 17 bp, Homo sapiens
ccttcgaaatctggcaa

SEQ ID NO: 1985 - DNA, 17 bp, Homo sapiens
cttcgaaatctggcaag

SEQ ID NO: 1986 - DNA, 17 bp, Homo sapiens
ttcgaaatctggcaagt

SEQ ID NO: 1987 - DNA, 17 bp, Homo sapiens
tcgaaatctggcaagtg

SEQ ID NO: 1988 - DNA, 17 bp, Homo sapiens
cgaaatctggcaagtga

SEQ ID NO: 1989 - DNA, 17 bp, Homo sapiens
gaaatctggcaagtgac

SEQ ID NO: 1990 - DNA, 17 bp, Homo sapiens
aaatctggcaagtgacg

SEQ ID NO: 1991 - DNA, 17 bp, Homo sapiens
aatctggcaagtgacga

SEQ ID NO: 1992 - DNA, 17 bp, Homo sapiens
atctggcaagtgacgat

SEQ ID NO: 1993 - DNA, 17 bp, Homo sapiens
tctggcaagtgacgatt

SEQ ID NO: 1994 - DNA, 17 bp, Homo sapiens
ctggcaagtgacgattc

SEQ ID NO: 1995 - DNA, 17 bp, Homo sapiens
tggcaagtgacgattcc

SEQ ID NO: 1996 - DNA, 17 bp, Homo sapiens
ggcaagtgacgattcct

SEQ ID NO: 1997 - DNA, 17 bp, Homo sapiens
gcaagtgacgattccta

SEQ ID NO: 1998 - DNA, 17 bp, Homo sapiens
caagtgacgattcctac

SEQ ID NO: 1999 - DNA, 17 bp, Homo sapiens
aagtgacgattcctaca

SEQ ID NO: 2000 - DNA, 17 bp, Homo sapiens
agtgacgattcctacat

SEQ ID NO: 2001 - DNA, 17 bp, Homo sapiens
gtgacgattcctacatc

SEQ ID NO: 2002 - DNA, 17 bp, Homo sapiens
tgacgattcctacatca

SEQ ID NO: 2003 - DNA, 17 bp, Homo sapiens
gacgattcctacatcac

SEQ ID NO: 2004 - DNA, 17 bp, Homo sapiens
acgattcctacatcaca

SEQ ID NO: 2005 - DNA, 17 bp, Homo sapiens
cgattcctacatcacac

SEQ ID NO: 2006 - DNA, 17 bp, Homo sapiens
gattcctacatcacacc

SEQ ID NO: 2007 - DNA, 17 bp, Homo sapiens
attcctacatcacacca

SEQ ID NO: 2008 - DNA, 17 bp, Homo sapiens
ttcctacatcacaccat

SEQ ID NO: 2009 - DNA, 17 bp, Homo sapiens
tcctacatcacaccata

SEQ ID NO: 2010 - DNA, 17 bp, Homo sapiens
cctacatcacaccatat

SEQ ID NO: 2011 - DNA, 17 bp, Homo sapiens
ctacatcacaccatatt

SEQ ID NO: 2012 - DNA, 17 bp, Homo sapiens
tacatcacaccatattt

SEQ ID NO: 2013 - DNA, 17 bp, Homo sapiens
acatcacaccatatttt

SEQ ID NO: 2014 - DNA, 17 bp, Homo sapiens
catcacaccatatttta

SEQ ID NO: 2015 - DNA, 17 bp, Homo sapiens
atcacaccatattttaa

SEQ ID NO: 2016 - DNA, 17 bp, Homo sapiens
tcacaccatattttaac

SEQ ID NO: 2017 - DNA, 17 bp, Homo sapiens
cacaccatattttaacg

SEQ ID NO: 2018 - DNA, 17 bp, Homo sapiens
acaccatattttaacgt

SEQ ID NO: 2019 - DNA, 17 bp, Homo sapiens
caccatattttaacgta

SEQ ID NO: 2020 - DNA, 17 bp, Homo sapiens
accatattttaacgtag

SEQ ID NO: 2021 - DNA, 17 bp, Homo sapiens
ccatattttaacgtaga

SEQ ID NO: 2022 - DNA, 17 bp, Homo sapiens
catattttaacgtagag

SEQ ID NO: 2023 - DNA, 17 bp, Homo sapiens
atattttaacgtagagg

SEQ ID NO: 2024 - DNA, 17 bp, Homo sapiens
tattttaacgtagagga

SEQ ID NO: 2025 - DNA, 17 bp, Homo sapiens
attttaacgtagaggag

SEQ ID NO: 2026 - DNA, 17 bp, Homo sapiens
ttttaacgtagaggaga

SEQ ID NO: 2027 - DNA, 17 bp, Homo sapiens
tttaacgtagaggagaa

SEQ ID NO: 2028 - DNA, 17 bp, Homo sapiens
ttaacgtagaggagaat

SEQ ID NO: 2029 - DNA, 25 bp, Homo sapiens
caggaaaccgtctggtgggatctcc

SEQ ID NO: 2030 - DNA, 25 bp, Homo sapiens
aggaaaccgtctggtgggatctccg

SEQ ID NO: 2031 - DNA, 25 bp, Homo sapiens
ggaaaccgtctggtgggatctccgc

SEQ ID NO: 2032 - DNA, 25 bp, Homo sapiens
gaaaccgtctggtgggatctccgca

SEQ ID NO: 2033 - DNA, 25 bp, Homo sapiens
aaaccgtctggtgggatctccgcag

SEQ ID NO: 2034 - DNA, 25 bp, Homo sapiens
aaccgtctggtgggatctccgcagc

SEQ ID NO: 2035 - DNA, 25 bp, Homo sapiens
accgtctggtgggatctccgcagct

SEQ ID NO: 2036 - DNA, 25 bp, Homo sapiens
ccgtctggtgggatctccgcagctg

SEQ ID NO: 2037 - DNA, 25 bp, Homo sapiens
cgtctggtgggatctccgcagctgc

SEQ ID NO: 2038 - DNA, 25 bp, Homo sapiens
gtctggtgggatctccgcagctgct

SEQ ID NO: 2039 - DNA, 25 bp, Homo sapiens
tctggtgggatctccgcagctgctt

SEQ ID NO: 2040 - DNA, 25 bp, Homo sapiens
ctggtgggatctccgcagctgcttt

SEQ ID NO: 2041 - DNA, 25 bp, Homo sapiens
tggtgggatctccgcagctgctttt

SEQ ID NO: 2042 - DNA, 25 bp, Homo sapiens
ggtgggatctccgcagctgcttttc

SEQ ID NO: 2043 - DNA, 25 bp, Homo sapiens
gtgggatctccgcagctgcttttca

SEQ ID NO: 2044 - DNA, 25 bp, Homo sapiens
tgggatctccgcagctgcttttcac

SEQ ID NO: 2045 - DNA, 25 bp, Homo sapiens
gggatctccgcagctgcttttcacc

SEQ ID NO: 2046 - DNA, 25 bp, Homo sapiens
ggatctccgcagctgcttttcacct

SEQ ID NO: 2047 - DNA, 25 bp, Homo sapiens
gatctccgcagctgcttttcacctg

SEQ ID NO: 2048 - DNA, 25 bp, Homo sapiens
atctccgcagctgcttttcacctgc

SEQ ID NO: 2049 - DNA, 25 bp, Homo sapiens
tctccgcagctgcttttcacctgct

SEQ ID NO: 2050 - DNA, 25 bp, Homo sapiens
ctccgcagctgcttttcacctgctg

SEQ ID NO: 2051 - DNA, 25 bp, Homo sapiens
tccgcagctgcttttcacctgctgt

SEQ ID NO: 2052 - DNA, 25 bp, Homo sapiens
ccgcagctgcttttcacctgctgtt

SEQ ID NO: 2053 - DNA, 25 bp, Homo sapiens
cgcagctgcttttcacctgctgttc

SEQ ID NO: 2054 - DNA, 25 bp, Homo sapiens
gcagctgcttttcacctgctgttcc

SEQ ID NO: 2055 - DNA, 25 bp, Homo sapiens
cagctgcttttcacctgctgttcct

SEQ ID NO: 2056 - DNA, 25 bp, Homo sapiens
agctgcttttcacctgctgttcctc

SEQ ID NO: 2057 - DNA, 25 bp, Homo sapiens
gctgcttttcacctgctgttcctcc

SEQ ID NO: 2058 - DNA, 25 bp, Homo sapiens
ctgcttttcacctgctgttcctcct

SEQ ID NO: 2059 - DNA, 25 bp, Homo sapiens
tgcttttcacctgctgttcctcctg

SEQ ID NO: 2060 - DNA, 25 bp, Homo sapiens
gcttttcacctgctgttcctcctgc

SEQ ID NO: 2061 - DNA, 25 bp, Homo sapiens
cttttcacctgctgttcctcctgcg

SEQ ID NO: 2062 - DNA, 25 bp, Homo sapiens
ttttcacctgctgttcctcctgcgc

SEQ ID NO: 2063 - DNA, 25 bp, Homo sapiens
tttcacctgctgttcctcctgcgct

SEQ ID NO: 2064 - DNA, 25 bp, Homo sapiens
ttcacctgctgttcctcctgcgctt

SEQ ID NO: 2065 - DNA, 25 bp, Homo sapiens
tcacctgctgttcctcctgcgcttc

SEQ ID NO: 2066 - DNA, 25 bp, Homo sapiens
cacctgctgttcctcctgcgcttcc

SEQ ID NO: 2067 - DNA, 25 bp, Homo sapiens
acctgctgttcctcctgcgcttcct

SEQ ID NO: 2068 - DNA, 25 bp, Homo sapiens
cctgctgttcctcctgcgcttccta

SEQ ID NO: 2069 - DNA, 25 bp, Homo sapiens
ctgctgttcctcctgcgcttcctaa

SEQ ID NO: 2070 - DNA, 25 bp, Homo sapiens
tgctgttcctcctgcgcttcctaag

SEQ ID NO: 2071 - DNA, 25 bp, Homo sapiens
gctgttcctcctgcgcttcctaaga

SEQ ID NO: 2072 - DNA, 25 bp, Homo sapiens
ctgttcctcctgcgcttcctaagag

SEQ ID NO: 2073 - DNA, 25 bp, Homo sapiens
tgttcctcctgcgcttcctaagagg

SEQ ID NO: 2074 - DNA, 25 bp, Homo sapiens
gttcctcctgcgcttcctaagagga

SEQ ID NO: 2075 - DNA, 25 bp, Homo sapiens
ttcctcctgcgcttcctaagaggaa

SEQ ID NO: 2076 - DNA, 25 bp, Homo sapiens
tcctcctgcgcttcctaagaggaag

SEQ ID NO: 2077 - DNA, 25 bp, Homo sapiens
cctcctgcgcttcctaagaggaaga

SEQ ID NO: 2078 - DNA, 25 bp, Homo sapiens
ctcctgcgcttcctaagaggaagaa

SEQ ID NO: 2079 - DNA, 25 bp, Homo sapiens
tcctgcgcttcctaagaggaagaat

SEQ ID NO: 2080 - DNA, 25 bp, Homo sapiens
cctgcgcttcctaagaggaagaatc

SEQ ID NO: 2081 - DNA, 25 bp, Homo sapiens
ctgcgcttcctaagaggaagaatca

SEQ ID NO: 2082 - DNA, 25 bp, Homo sapiens
tgcgcttcctaagaggaagaatcaa

SEQ ID NO: 2083 - DNA, 25 bp, Homo sapiens
gcgcttcctaagaggaagaatcaat

SEQ ID NO: 2084 - DNA, 25 bp, Homo sapiens
cgcttcctaagaggaagaatcaatg

SEQ ID NO: 2085 - DNA, 25 bp, Homo sapiens
gcttcctaagaggaagaatcaatgc

SEQ ID NO: 2086 - DNA, 25 bp, Homo sapiens
cttcctaagaggaagaatcaatgcc

SEQ ID NO: 2087 - DNA, 25 bp, Homo sapiens
ttcctaagaggaagaatcaatgccg

SEQ ID NO: 2088 - DNA, 25 bp, Homo sapiens
tcctaagaggaagaatcaatgccgt

SEQ ID NO: 2089 - DNA, 25 bp, Homo sapiens
cctaagaggaagaatcaatgccgtg

SEQ ID NO: 2090 - DNA, 25 bp, Homo sapiens
ctaagaggaagaatcaatgccgtgg

SEQ ID NO: 2091 - DNA, 25 bp, Homo sapiens
taagaggaagaatcaatgccgtggg

SEQ ID NO: 2092 - DNA, 25 bp, Homo sapiens
aagaggaagaatcaatgccgtgggt

SEQ ID NO: 2093 - DNA, 25 bp, Homo sapiens
agaggaagaatcaatgccgtgggtg

SEQ ID NO: 2094 - DNA, 25 bp, Homo sapiens
gaggaagaatcaatgccgtgggtgg

SEQ ID NO: 2095 - DNA, 25 bp, Homo sapiens
aggaagaatcaatgccgtgggtgga

SEQ ID NO: 2096 - DNA, 25 bp, Homo sapiens
ggaagaatcaatgccgtgggtggag

SEQ ID NO: 2097 - DNA, 25 bp, Homo sapiens
gaagaatcaatgccgtgggtggagc

SEQ ID NO: 2098 - DNA, 25 bp, Homo sapiens
aagaatcaatgccgtgggtggagcc

SEQ ID NO: 2099 - DNA, 25 bp, Homo sapiens
agaatcaatgccgtgggtggagccc

SEQ ID NO: 2100 - DNA, 25 bp, Homo sapiens
gaatcaatgccgtgggtggagccca

SEQ ID NO: 2101 - DNA, 25 bp, Homo sapiens
aatcaatgccgtgggtggagcccaa

SEQ ID NO: 2102 - DNA, 25 bp, Homo sapiens
atcaatgccgtgggtggagcccaag

SEQ ID NO: 2103 - DNA, 25 bp, Homo sapiens
tcaatgccgtgggtggagcccaagc

SEQ ID NO: 2104 - DNA, 25 bp, Homo sapiens
caatgccgtgggtggagcccaagcc

SEQ ID NO: 2105 - DNA, 25 bp, Homo sapiens
aatgccgtgggtggagcccaagccc

SEQ ID NO: 2106 - DNA, 25 bp, Homo sapiens
atgccgtgggtggagcccaagccca

SEQ ID NO: 2107 - DNA, 25 bp, Homo sapiens
tgccgtgggtggagcccaagcccag

SEQ ID NO: 2108 - DNA, 25 bp, Homo sapiens
gccgtgggtggagcccaagcccagg

SEQ ID NO: 2109 - DNA, 25 bp, Homo sapiens
ccgtgggtggagcccaagcccaggc

SEQ ID NO: 2110 - DNA, 25 bp, Homo sapiens
cgtgggtggagcccaagcccaggcc

SEQ ID NO: 2111 - DNA, 25 bp, Homo sapiens
gtgggtggagcccaagcccaggccg

SEQ ID NO: 2112 - DNA, 25 bp, Homo sapiens
tgggtggagcccaagcccaggccgg

SEQ ID NO: 2113 - DNA, 25 bp, Homo sapiens
gggtggagcccaagcccaggccggg

SEQ ID NO: 2114 - DNA, 25 bp, Homo sapiens
ggtggagcccaagcccaggccgggg

SEQ ID NO: 2115 - DNA, 25 bp, Homo sapiens
gtggagcccaagcccaggccggggc

SEQ ID NO: 2116 - DNA, 25 bp, Homo sapiens
tggagcccaagcccaggccggggcc

SEQ ID NO: 2117 - DNA, 25 bp, Homo sapiens
ggagcccaagcccaggccggggccg

SEQ ID NO: 2118 - DNA, 25 bp, Homo sapiens
gagcccaagcccaggccggggccgg

SEQ ID NO: 2119 - DNA, 25 bp, Homo sapiens
agcccaagcccaggccggggccgga

SEQ ID NO: 2120 - DNA, 25 bp, Homo sapiens
gcccaagcccaggccggggccggag

SEQ ID NO: 2121 - DNA, 25 bp, Homo sapiens
cccaagcccaggccggggccggagc

SEQ ID NO: 2122 - DNA, 25 bp, Homo sapiens
ccaagcccaggccggggccggagca

SEQ ID NO: 2123 - DNA, 25 bp, Homo sapiens
caagcccaggccggggccggagcag

SEQ ID NO: 2124 - DNA, 25 bp, Homo sapiens
aagcccaggccggggccggagcaga

SEQ ID NO: 2125 - DNA, 25 bp, Homo sapiens
agcccaggccggggccggagcagaa

SEQ ID NO: 2126 - DNA, 25 bp, Homo sapiens
gcccaggccggggccggagcagaag

SEQ ID NO: 2127 - DNA, 25 bp, Homo sapiens
cccaggccggggccggagcagaagc

SEQ ID NO: 2128 - DNA, 25 bp, Homo sapiens
ccaggccggggccggagcagaagcc

SEQ ID NO: 2129 - DNA, 25 bp, Homo sapiens
caggccggggccggagcagaagccc

SEQ ID NO: 2130 - DNA, 25 bp, Homo sapiens
aggccggggccggagcagaagccca

SEQ ID NO: 2131 - DNA, 25 bp, Homo sapiens
ggccggggccggagcagaagcccaa

SEQ ID NO: 2132 - DNA, 25 bp, Homo sapiens
gccggggccggagcagaagcccaag

SEQ ID NO: 2133 - DNA, 25 bp, Homo sapiens
ccggggccggagcagaagcccaagc

SEQ ID NO: 2134 - DNA, 25 bp, Homo sapiens
cggggccggagcagaagcccaagct

SEQ ID NO: 2135 - DNA, 25 bp, Homo sapiens
ggggccggagcagaagcccaagctc

SEQ ID NO: 2136 - DNA, 25 bp, Homo sapiens
gggccggagcagaagcccaagctca

SEQ ID NO: 2137 - DNA, 25 bp, Homo sapiens
ggccggagcagaagcccaagctcac

SEQ ID NO: 2138 - DNA, 25 bp, Homo sapiens
gccggagcagaagcccaagctcacc

SEQ ID NO: 2139 - DNA, 25 bp, Homo sapiens
ccggagcagaagcccaagctcacca

SEQ ID NO: 2140 - DNA, 25 bp, Homo sapiens
cggagcagaagcccaagctcaccaa

SEQ ID NO: 2141 - DNA, 25 bp, Homo sapiens
ggagcagaagcccaagctcaccaaa

SEQ ID NO: 2142 - DNA, 25 bp, Homo sapiens
gagcagaagcccaagctcaccaaac

SEQ ID NO: 2143 - DNA, 25 bp, Homo sapiens
agcagaagcccaagctcaccaaacc

SEQ ID NO: 2144 - DNA, 25 bp, Homo sapiens
gcagaagcccaagctcaccaaaccg

SEQ ID NO: 2145 - DNA, 25 bp, Homo sapiens
cagaagcccaagctcaccaaaccgg

SEQ ID NO: 2146 - DNA, 25 bp, Homo sapiens
agaagcccaagctcaccaaaccgga

SEQ ID NO: 2147 - DNA, 25 bp, Homo sapiens
gaagcccaagctcaccaaaccggac

SEQ ID NO: 2148 - DNA, 25 bp, Homo sapiens
aagcccaagctcaccaaaccggact

SEQ ID NO: 2149 - DNA, 25 bp, Homo sapiens
agcccaagctcaccaaaccggactc

SEQ ID NO: 2150 - DNA, 25 bp, Homo sapiens
gcccaagctcaccaaaccggactct

SEQ ID NO: 2151 - DNA, 25 bp, Homo sapiens
cccaagctcaccaaaccggactctg

SEQ ID NO: 2152 - DNA, 25 bp, Homo sapiens
ccaagctcaccaaaccggactctgc

SEQ ID NO: 2153 - DNA, 25 bp, Homo sapiens
caagctcaccaaaccggactctgcc

SEQ ID NO: 2154 - DNA, 25 bp, Homo sapiens
aagctcaccaaaccggactctgcca

SEQ ID NO: 2155 - DNA, 25 bp, Homo sapiens
agctcaccaaaccggactctgccac

SEQ ID NO: 2156 - DNA, 25 bp, Homo sapiens
gctcaccaaaccggactctgccacc

SEQ ID NO: 2157 - DNA, 25 bp, Homo sapiens
ctcaccaaaccggactctgccaccg

SEQ ID NO: 2158 - DNA, 25 bp, Homo sapiens
tcaccaaaccggactctgccaccgg

SEQ ID NO: 2159 - DNA, 25 bp, Homo sapiens
caccaaaccggactctgccaccggg

SEQ ID NO: 2160 - DNA, 25 bp, Homo sapiens
accaaaccggactctgccaccgggc

SEQ ID NO: 2161 - DNA, 25 bp, Homo sapiens
ccaaaccggactctgccaccgggcc

SEQ ID NO: 2162 - DNA, 25 bp, Homo sapiens
caaaccggactctgccaccgggccg

SEQ ID NO: 2163 - DNA, 25 bp, Homo sapiens
aaaccggactctgccaccgggccgc

SEQ ID NO: 2164 - DNA, 25 bp, Homo sapiens
aaccggactctgccaccgggccgca

SEQ ID NO: 2165 - DNA, 25 bp, Homo sapiens
accggactctgccaccgggccgcag

SEQ ID NO: 2166 - DNA, 25 bp, Homo sapiens
ccggactctgccaccgggccgcagt

SEQ ID NO: 2167 - DNA, 25 bp, Homo sapiens
cggactctgccaccgggccgcagtg

SEQ ID NO: 2168 - DNA, 25 bp, Homo sapiens
ggactctgccaccgggccgcagtgg

SEQ ID NO: 2169 - DNA, 25 bp, Homo sapiens
gactctgccaccgggccgcagtggt

SEQ ID NO: 2170 - DNA, 25 bp, Homo sapiens
actctgccaccgggccgcagtggta

SEQ ID NO: 2171 - DNA, 25 bp, Homo sapiens
ctctgccaccgggccgcagtggtac

SEQ ID NO: 2172 - DNA, 25 bp, Homo sapiens
tctgccaccgggccgcagtggtacc

SEQ ID NO: 2173 - DNA, 25 bp, Homo sapiens
ctgccaccgggccgcagtggtacca

SEQ ID NO: 2174 - DNA, 25 bp, Homo sapiens
tgccaccgggccgcagtggtaccag

SEQ ID NO: 2175 - DNA, 25 bp, Homo sapiens
gccaccgggccgcagtggtaccagg

SEQ ID NO: 2176 - DNA, 25 bp, Homo sapiens
ccaccgggccgcagtggtaccagga

SEQ ID NO: 2177 - DNA, 25 bp, Homo sapiens
caccgggccgcagtggtaccaggaa

SEQ ID NO: 2178 - DNA, 25 bp, Homo sapiens
accgggccgcagtggtaccaggaat

SEQ ID NO: 2179 - DNA, 25 bp, Homo sapiens
ccgggccgcagtggtaccaggaatc

SEQ ID NO: 2180 - DNA, 25 bp, Homo sapiens
cgggccgcagtggtaccaggaatct

SEQ ID NO: 2181 - DNA, 25 bp, Homo sapiens
gggccgcagtggtaccaggaatctc

SEQ ID NO: 2182 - DNA, 25 bp, Homo sapiens
ggccgcagtggtaccaggaatctca

SEQ ID NO: 2183 - DNA, 25 bp, Homo sapiens
gccgcagtggtaccaggaatctcag

SEQ ID NO: 2184 - DNA, 25 bp, Homo sapiens
ccgcagtggtaccaggaatctcagg

SEQ ID NO: 2185 - DNA, 25 bp, Homo sapiens
cgcagtggtaccaggaatctcagga

SEQ ID NO: 2186 - DNA, 25 bp, Homo sapiens
gcagtggtaccaggaatctcaggaa

SEQ ID NO: 2187 - DNA, 25 bp, Homo sapiens
cagtggtaccaggaatctcaggaat

SEQ ID NO: 2188 - DNA, 25 bp, Homo sapiens
agtggtaccaggaatctcaggaatc

SEQ ID NO: 2189 - DNA, 25 bp, Homo sapiens
gtggtaccaggaatctcaggaatcg

SEQ ID NO: 2190 - DNA, 25 bp, Homo sapiens
tggtaccaggaatctcaggaatcgg

SEQ ID NO: 2191 - DNA, 25 bp, Homo sapiens
ggtaccaggaatctcaggaatcgga

SEQ ID NO: 2192 - DNA, 25 bp, Homo sapiens
gtaccaggaatctcaggaatcggag

SEQ ID NO: 2193 - DNA, 25 bp, Homo sapiens
taccaggaatctcaggaatcggagt

SEQ ID NO: 2194 - DNA, 25 bp, Homo sapiens
accaggaatctcaggaatcggagtc

SEQ ID NO: 2195 - DNA, 25 bp, Homo sapiens
ccaggaatctcaggaatcggagtcg

SEQ ID NO: 2196 - DNA, 25 bp, Homo sapiens
caggaatctcaggaatcggagtcgg

SEQ ID NO: 2197 - DNA, 25 bp, Homo sapiens
aggaatctcaggaatcggagtcgga

SEQ ID NO: 2198 - DNA, 25 bp, Homo sapiens
ggaatctcaggaatcggagtcggaa

SEQ ID NO: 2199 - DNA, 25 bp, Homo sapiens
gaatctcaggaatcggagtcggaag

SEQ ID NO: 2200 - DNA, 25 bp, Homo sapiens
aatctcaggaatcggagtcggaagg

SEQ ID NO: 2201 - DNA, 25 bp, Homo sapiens
atctcaggaatcggagtcggaaggc

SEQ ID NO: 2202 - DNA, 25 bp, Homo sapiens
tctcaggaatcggagtcggaaggca

SEQ ID NO: 2203 - DNA, 25 bp, Homo sapiens
ctcaggaatcggagtcggaaggcaa

SEQ ID NO: 2204 - DNA, 25 bp, Homo sapiens
tcaggaatcggagtcggaaggcaag

SEQ ID NO: 2205 - DNA, 25 bp, Homo sapiens
caggaatcggagtcggaaggcaagc

SEQ ID NO: 2206 - DNA, 25 bp, Homo sapiens
aggaatcggagtcggaaggcaagca

SEQ ID NO: 2207 - DNA, 25 bp, Homo sapiens
ggaatcggagtcggaaggcaagcag

SEQ ID NO: 2208 - DNA, 25 bp, Homo sapiens
gaatcggagtcggaaggcaagcagc

SEQ ID NO: 2209 - DNA, 25 bp, Homo sapiens
aatcggagtcggaaggcaagcagcc

SEQ ID NO: 2210 - DNA, 25 bp, Homo sapiens
atcggagtcggaaggcaagcagcca

SEQ ID NO: 2211 - DNA, 25 bp, Homo sapiens
tcggagtcggaaggcaagcagccac

SEQ ID NO: 2212 - DNA, 25 bp, Homo sapiens
cggagtcggaaggcaagcagccacc

SEQ ID NO: 2213 - DNA, 25 bp, Homo sapiens
ggagtcggaaggcaagcagccaccc

SEQ ID NO: 2214 - DNA, 25 bp, Homo sapiens
gagtcggaaggcaagcagccacccc

SEQ ID NO: 2215 - DNA, 25 bp, Homo sapiens
agtcggaaggcaagcagccaccccc

SEQ ID NO: 2216 - DNA, 25 bp, Homo sapiens
gtcggaaggcaagcagccacccccg

SEQ ID NO: 2217 - DNA, 25 bp, Homo sapiens
tcggaaggcaagcagccacccccgg

SEQ ID NO: 2218 - DNA, 25 bp, Homo sapiens
cggaaggcaagcagccacccccggg

SEQ ID NO: 2219 - DNA, 25 bp, Homo sapiens
ggaaggcaagcagccacccccggga

SEQ ID NO: 2220 - DNA, 25 bp, Homo sapiens
gaaggcaagcagccacccccgggac

SEQ ID NO: 2221 - DNA, 25 bp, Homo sapiens
aaggcaagcagccacccccgggacc

SEQ ID NO: 2222 - DNA, 25 bp, Homo sapiens
aggcaagcagccacccccgggaccc

SEQ ID NO: 2223 - DNA, 25 bp, Homo sapiens
ggcaagcagccacccccgggacccc

SEQ ID NO: 2224 - DNA, 25 bp, Homo sapiens
gcaagcagccacccccgggacccct

SEQ ID NO: 2225 - DNA, 25 bp, Homo sapiens
caagcagccacccccgggacccctg

SEQ ID NO: 2226 - DNA, 25 bp, Homo sapiens
aagcagccacccccgggacccctgg

SEQ ID NO: 2227 - DNA, 25 bp, Homo sapiens
agcagccacccccgggacccctggc

SEQ ID NO: 2228 - DNA, 25 bp, Homo sapiens
gcagccacccccgggacccctggca

SEQ ID NO: 2229 - DNA, 25 bp, Homo sapiens
cagccacccccgggacccctggcac

SEQ ID NO: 2230 - DNA, 25 bp, Homo sapiens
agccacccccgggacccctggcacc

SEQ ID NO: 2231 - DNA, 25 bp, Homo sapiens
gccacccccgggacccctggcaccc

SEQ ID NO: 2232 - DNA, 25 bp, Homo sapiens
ccacccccgggacccctggcacccc

SEQ ID NO: 2233 - DNA, 25 bp, Homo sapiens
cacccccgggacccctggcaccccc

SEQ ID NO: 2234 - DNA, 25 bp, Homo sapiens
acccccgggacccctggcacccccg

SEQ ID NO: 2235 - DNA, 25 bp, Homo sapiens
cccccgggacccctggcacccccga

SEQ ID NO: 2236 - DNA, 25 bp, Homo sapiens
ccccgggacccctggcacccccgaa

SEQ ID NO: 2237 - DNA, 25 bp, Homo sapiens
cccgggacccctggcacccccgaaa

SEQ ID NO: 2238 - DNA, 25 bp, Homo sapiens
ccgggacccctggcacccccgaaat

SEQ ID NO: 2239 - DNA, 25 bp, Homo sapiens
cgggacccctggcacccccgaaatc

SEQ ID NO: 2240 - DNA, 25 bp, Homo sapiens
gggacccctggcacccccgaaatcc

SEQ ID NO: 2241 - DNA, 25 bp, Homo sapiens
ggacccctggcacccccgaaatccc

SEQ ID NO: 2242 - DNA, 25 bp, Homo sapiens
gacccctggcacccccgaaatcccc

SEQ ID NO: 2243 - DNA, 25 bp, Homo sapiens
acccctggcacccccgaaatccccc

SEQ ID NO: 2244 - DNA, 25 bp, Homo sapiens
cccctggcacccccgaaatcccccg

SEQ ID NO: 2245 - DNA, 25 bp, Homo sapiens
ccctggcacccccgaaatcccccga

SEQ ID NO: 2246 - DNA, 25 bp, Homo sapiens
cctggcacccccgaaatcccccgaa

SEQ ID NO: 2247 - DNA, 25 bp, Homo sapiens
ctggcacccccgaaatcccccgaac

SEQ ID NO: 2248 - DNA, 25 bp, Homo sapiens
tggcacccccgaaatcccccgaacc

SEQ ID NO: 2249 - DNA, 25 bp, Homo sapiens
ggcacccccgaaatcccccgaaccc

SEQ ID NO: 2250 - DNA, 25 bp, Homo sapiens
gcacccccgaaatcccccgaaccct

SEQ ID NO: 2251 - DNA, 25 bp, Homo sapiens
cacccccgaaatcccccgaaccctc

SEQ ID NO: 2252 - DNA, 25 bp, Homo sapiens
acccccgaaatcccccgaaccctca

SEQ ID NO: 2253 - DNA, 25 bp, Homo sapiens
cccccgaaatcccccgaaccctcag

SEQ ID NO: 2254 - DNA, 25 bp, Homo sapiens
ccccgaaatcccccgaaccctcagg

SEQ ID NO: 2255 - DNA, 25 bp, Homo sapiens
cccgaaatcccccgaaccctcagga

SEQ ID NO: 2256 - DNA, 25 bp, Homo sapiens
ccgaaatcccccgaaccctcaggac

SEQ ID NO: 2257 - DNA, 25 bp, Homo sapiens
cgaaatcccccgaaccctcaggacc

SEQ ID NO: 2258 - DNA, 25 bp, Homo sapiens
gaaatcccccgaaccctcaggaccc

SEQ ID NO: 2259 - DNA, 25 bp, Homo sapiens
aaatcccccgaaccctcaggacccc

SEQ ID NO: 2260 - DNA, 25 bp, Homo sapiens
aatcccccgaaccctcaggacccct

SEQ ID NO: 2261 - DNA, 25 bp, Homo sapiens
atcccccgaaccctcaggacccctg

SEQ ID NO: 2262 - DNA, 25 bp, Homo sapiens
tcccccgaaccctcaggacccctgg

SEQ ID NO: 2263 - DNA, 25 bp, Homo sapiens
cccccgaaccctcaggacccctggc

SEQ ID NO: 2264 - DNA, 25 bp, Homo sapiens
ccccgaaccctcaggacccctggcg

SEQ ID NO: 2265 - DNA, 25 bp, Homo sapiens
cccgaaccctcaggacccctggcgt

SEQ ID NO: 2266 - DNA, 25 bp, Homo sapiens
ccgaaccctcaggacccctggcgtc

SEQ ID NO: 2267 - DNA, 25 bp, Homo sapiens
cgaaccctcaggacccctggcgtcg

SEQ ID NO: 2268 - DNA, 25 bp, Homo sapiens
gaaccctcaggacccctggcgtcgg

SEQ ID NO: 2269 - DNA, 25 bp, Homo sapiens
aaccctcaggacccctggcgtcgga

SEQ ID NO: 2270 - DNA, 25 bp, Homo sapiens
accctcaggacccctggcgtcggag

SEQ ID NO: 2271 - DNA, 25 bp, Homo sapiens
ccctcaggacccctggcgtcggagc

SEQ ID NO: 2272 - DNA, 25 bp, Homo sapiens
cctcaggacccctggcgtcggagca

SEQ ID NO: 2273 - DNA, 25 bp, Homo sapiens
ctcaggacccctggcgtcggagcag

SEQ ID NO: 2274 - DNA, 25 bp, Homo sapiens
tcaggacccctggcgtcggagcagg

SEQ ID NO: 2275 - DNA, 25 bp, Homo sapiens
caggacccctggcgtcggagcagga

SEQ ID NO: 2276 - DNA, 25 bp, Homo sapiens
aggacccctggcgtcggagcaggat

SEQ ID NO: 2277 - DNA, 25 bp, Homo sapiens
ggacccctggcgtcggagcaggatg

SEQ ID NO: 2278 - DNA, 25 bp, Homo sapiens
gacccctggcgtcggagcaggatgc

SEQ ID NO: 2279 - DNA, 25 bp, Homo sapiens
acccctggcgtcggagcaggatgca

SEQ ID NO: 2280 - DNA, 25 bp, Homo sapiens
cccctggcgtcggagcaggatgcac

SEQ ID NO: 2281 - DNA, 25 bp, Homo sapiens
ccctggcgtcggagcaggatgcacc

SEQ ID NO: 2282 - DNA, 25 bp, Homo sapiens
cctggcgtcggagcaggatgcaccc

SEQ ID NO: 2283 - DNA, 25 bp, Homo sapiens
ctggcgtcggagcaggatgcacccc

SEQ ID NO: 2284 - DNA, 25 bp, Homo sapiens
tggcgtcggagcaggatgcacccct

SEQ ID NO: 2285 - DNA, 25 bp, Homo sapiens
ggcgtcggagcaggatgcacccctg

SEQ ID NO: 2286 - DNA, 25 bp, Homo sapiens
gcgtcggagcaggatgcacccctgc

SEQ ID NO: 2287 - DNA, 25 bp, Homo sapiens
cgtcggagcaggatgcacccctgcc

SEQ ID NO: 2288 - DNA, 25 bp, Homo sapiens
gtcggagcaggatgcacccctgcca

SEQ ID NO: 2289 - DNA, 25 bp, Homo sapiens
tcggagcaggatgcacccctgccag

SEQ ID NO: 2290 - DNA, 25 bp, Homo sapiens
cggagcaggatgcacccctgccaga

SEQ ID NO: 2291 - DNA, 25 bp, Homo sapiens
ggagcaggatgcacccctgccagag

SEQ ID NO: 2292 - DNA, 25 bp, Homo sapiens
gagcaggatgcacccctgccagagg

SEQ ID NO: 2293 - DNA, 25 bp, Homo sapiens
agcaggatgcacccctgccagaggg

SEQ ID NO: 2294 - DNA, 25 bp, Homo sapiens
gcaggatgcacccctgccagagggg

SEQ ID NO: 2295 - DNA, 25 bp, Homo sapiens
caggatgcacccctgccagaggggg

SEQ ID NO: 2296 - DNA, 25 bp, Homo sapiens
aggatgcacccctgccagaggggga

SEQ ID NO: 2297 - DNA, 25 bp, Homo sapiens
ggatgcacccctgccagagggggac

SEQ ID NO: 2298 - DNA, 25 bp, Homo sapiens
gatgcacccctgccagagggggacg

SEQ ID NO: 2299 - DNA, 25 bp, Homo sapiens
atgcacccctgccagagggggacga

SEQ ID NO: 2300 - DNA, 25 bp, Homo sapiens
tgcacccctgccagagggggacgat

SEQ ID NO: 2301 - DNA, 25 bp, Homo sapiens
gcacccctgccagagggggacgatg

SEQ ID NO: 2302 - DNA, 25 bp, Homo sapiens
cacccctgccagagggggacgatgc

SEQ ID NO: 2303 - DNA, 25 bp, Homo sapiens
acccctgccagagggggacgatgca

SEQ ID NO: 2304 - DNA, 25 bp, Homo sapiens
cccctgccagagggggacgatgcac

SEQ ID NO: 2305 - DNA, 25 bp, Homo sapiens
ccctgccagagggggacgatgcacc

SEQ ID NO: 2306 - DNA, 25 bp, Homo sapiens
cctgccagagggggacgatgcaccc

SEQ ID NO: 2307 - DNA, 25 bp, Homo sapiens
ctgccagagggggacgatgcacccc

SEQ ID NO: 2308 - DNA, 25 bp, Homo sapiens
tgccagagggggacgatgcaccccc

SEQ ID NO: 2309 - DNA, 25 bp, Homo sapiens
gccagagggggacgatgcacccccc

SEQ ID NO: 2310 - DNA, 25 bp, Homo sapiens
ccagagggggacgatgcaccccccc

SEQ ID NO: 2311 - DNA, 25 bp, Homo sapiens
cagagggggacgatgcacccccccg

SEQ ID NO: 2312 - DNA, 25 bp, Homo sapiens
agagggggacgatgcacccccccgg

SEQ ID NO: 2313 - DNA, 25 bp, Homo sapiens
gagggggacgatgcacccccccggc

SEQ ID NO: 2314 - DNA, 25 bp, Homo sapiens
agggggacgatgcacccccccggcc

SEQ ID NO: 2315 - DNA, 25 bp, Homo sapiens
gggggacgatgcacccccccggccg

SEQ ID NO: 2316 - DNA, 25 bp, Homo sapiens
ggggacgatgcacccccccggccgt

SEQ ID NO: 2317 - DNA, 25 bp, Homo sapiens
gggacgatgcacccccccggccgtc

SEQ ID NO: 2318 - DNA, 25 bp, Homo sapiens
ggacgatgcacccccccggccgtcg

SEQ ID NO: 2319 - DNA, 25 bp, Homo sapiens
gacgatgcacccccccggccgtcga

SEQ ID NO: 2320 - DNA, 25 bp, Homo sapiens
acgatgcacccccccggccgtcgat

SEQ ID NO: 2321 - DNA, 25 bp, Homo sapiens
cgatgcacccccccggccgtcgatg

SEQ ID NO: 2322 - DNA, 25 bp, Homo sapiens
gatgcacccccccggccgtcgatgc

SEQ ID NO: 2323 - DNA, 25 bp, Homo sapiens
atgcacccccccggccgtcgatgct

SEQ ID NO: 2324 - DNA, 25 bp, Homo sapiens
tgcacccccccggccgtcgatgctg

SEQ ID NO: 2325 - DNA, 25 bp, Homo sapiens
gcacccccccggccgtcgatgctgg

SEQ ID NO: 2326 - DNA, 25 bp, Homo sapiens
cacccccccggccgtcgatgctgga

SEQ ID NO: 2327 - DNA, 25 bp, Homo sapiens
acccccccggccgtcgatgctggac

SEQ ID NO: 2328 - DNA, 25 bp, Homo sapiens
cccccccggccgtcgatgctggacg

SEQ ID NO: 2329 - DNA, 25 bp, Homo sapiens
ccccccggccgtcgatgctggacga

SEQ ID NO: 2330 - DNA, 25 bp, Homo sapiens
cccccggccgtcgatgctggacgat

SEQ ID NO: 2331 - DNA, 25 bp, Homo sapiens
ccccggccgtcgatgctggacgatg

SEQ ID NO: 2332 - DNA, 25 bp, Homo sapiens
cccggccgtcgatgctggacgatgc

SEQ ID NO: 2333 - DNA, 25 bp, Homo sapiens
ccggccgtcgatgctggacgatgca

SEQ ID NO: 2334 - DNA, 25 bp, Homo sapiens
cggccgtcgatgctggacgatgcac

SEQ ID NO: 2335 - DNA, 25 bp, Homo sapiens
ggccgtcgatgctggacgatgcacc

SEQ ID NO: 2336 - DNA, 25 bp, Homo sapiens
gccgtcgatgctggacgatgcaccc

SEQ ID NO: 2337 - DNA, 25 bp, Homo sapiens
ccgtcgatgctggacgatgcacccc

SEQ ID NO: 2338 - DNA, 25 bp, Homo sapiens
cgtcgatgctggacgatgcaccccg

SEQ ID NO: 2339 - DNA, 25 bp, Homo sapiens
gtcgatgctggacgatgcaccccgc

SEQ ID NO: 2340 - DNA, 25 bp, Homo sapiens
tcgatgctggacgatgcaccccgcc

SEQ ID NO: 2341 - DNA, 25 bp, Homo sapiens
cgatgctggacgatgcaccccgcct

SEQ ID NO: 2342 - DNA, 25 bp, Homo sapiens
gatgctggacgatgcaccccgcctg

SEQ ID NO: 2343 - DNA, 25 bp, Homo sapiens
atgctggacgatgcaccccgcctgc

SEQ ID NO: 2344 - DNA, 25 bp, Homo sapiens
tgctggacgatgcaccccgcctgcc

SEQ ID NO: 2345 - DNA, 25 bp, Homo sapiens
gctggacgatgcaccccgcctgccg

SEQ ID NO: 2346 - DNA, 25 bp, Homo sapiens
ctggacgatgcaccccgcctgccgc

SEQ ID NO: 2347 - DNA, 25 bp, Homo sapiens
tggacgatgcaccccgcctgccgct

SEQ ID NO: 2348 - DNA, 25 bp, Homo sapiens
ggacgatgcaccccgcctgccgctg

SEQ ID NO: 2349 - DNA, 25 bp, Homo sapiens
gacgatgcaccccgcctgccgctgg

SEQ ID NO: 2350 - DNA, 25 bp, Homo sapiens
acgatgcaccccgcctgccgctgga

SEQ ID NO: 2351 - DNA, 25 bp, Homo sapiens
cgatgcaccccgcctgccgctggag

SEQ ID NO: 2352 - DNA, 25 bp, Homo sapiens
gatgcaccccgcctgccgctggagc

SEQ ID NO: 2353 - DNA, 25 bp, Homo sapiens
atgcaccccgcctgccgctggagct

SEQ ID NO: 2354 - DNA, 25 bp, Homo sapiens
tgcaccccgcctgccgctggagctg

SEQ ID NO: 2355 - DNA, 25 bp, Homo sapiens
gcaccccgcctgccgctggagctgg

SEQ ID NO: 2356 - DNA, 25 bp, Homo sapiens
caccccgcctgccgctggagctgga

SEQ ID NO: 2357 - DNA, 25 bp, Homo sapiens
accccgcctgccgctggagctggac

SEQ ID NO: 2358 - DNA, 25 bp, Homo sapiens
ccccgcctgccgctggagctggacg

SEQ ID NO: 2359 - DNA, 25 bp, Homo sapiens
cccgcctgccgctggagctggacga

SEQ ID NO: 2360 - DNA, 25 bp, Homo sapiens
ccgcctgccgctggagctggacgat

SEQ ID NO: 2361 - DNA, 25 bp, Homo sapiens
cgcctgccgctggagctggacgatg

SEQ ID NO: 2362 - DNA, 25 bp, Homo sapiens
gcctgccgctggagctggacgatgc

SEQ ID NO: 2363 - DNA, 25 bp, Homo sapiens
cctgccgctggagctggacgatgca

SEQ ID NO: 2364 - DNA, 25 bp, Homo sapiens
ctgccgctggagctggacgatgcac

SEQ ID NO: 2365 - DNA, 25 bp, Homo sapiens
tgccgctggagctggacgatgcacc

SEQ ID NO: 2366 - DNA, 25 bp, Homo sapiens
gccgctggagctggacgatgcaccc

SEQ ID NO: 2367 - DNA, 25 bp, Homo sapiens
ccgctggagctggacgatgcacccc

SEQ ID NO: 2368 - DNA, 25 bp, Homo sapiens
cgctggagctggacgatgcacccct

SEQ ID NO: 2369 - DNA, 25 bp, Homo sapiens
gctggagctggacgatgcacccctg

SEQ ID NO: 2370 - DNA, 25 bp, Homo sapiens
ctggagctggacgatgcacccctgc

SEQ ID NO: 2371 - DNA, 25 bp, Homo sapiens
tggagctggacgatgcacccctgcc

SEQ ID NO: 2372 - DNA, 25 bp, Homo sapiens
ggagctggacgatgcacccctgccg

SEQ ID NO: 2373 - DNA, 25 bp, Homo sapiens
gagctggacgatgcacccctgccgg

SEQ ID NO: 2374 - DNA, 25 bp, Homo sapiens
agctggacgatgcacccctgccgga

SEQ ID NO: 2375 - DNA, 25 bp, Homo sapiens
gctggacgatgcacccctgccggag

SEQ ID NO: 2376 - DNA, 25 bp, Homo sapiens
ctggacgatgcacccctgccggagg

SEQ ID NO: 2377 - DNA, 25 bp, Homo sapiens
tggacgatgcacccctgccggagga

SEQ ID NO: 2378 - DNA, 25 bp, Homo sapiens
ggacgatgcacccctgccggaggag

SEQ ID NO: 2379 - DNA, 25 bp, Homo sapiens
gacgatgcacccctgccggaggagg

SEQ ID NO: 2380 - DNA, 25 bp, Homo sapiens
acgatgcacccctgccggaggagga

SEQ ID NO: 2381 - DNA, 25 bp, Homo sapiens
cgatgcacccctgccggaggaggaa

SEQ ID NO: 2382 - DNA, 25 bp, Homo sapiens
gatgcacccctgccggaggaggaaa

SEQ ID NO: 2383 - DNA, 25 bp, Homo sapiens
atgcacccctgccggaggaggaaac

SEQ ID NO: 2384 - DNA, 25 bp, Homo sapiens
tgcacccctgccggaggaggaaacc

SEQ ID NO: 2385 - DNA, 25 bp, Homo sapiens
gcacccctgccggaggaggaaaccc

SEQ ID NO: 2386 - DNA, 25 bp, Homo sapiens
cacccctgccggaggaggaaacccc

SEQ ID NO: 2387 - DNA, 25 bp, Homo sapiens
acccctgccggaggaggaaaccccc

SEQ ID NO: 2388 - DNA, 25 bp, Homo sapiens
cccctgccggaggaggaaacccccg

SEQ ID NO: 2389 - DNA, 25 bp, Homo sapiens
ccctgccggaggaggaaacccccga

SEQ ID NO: 2390 - DNA, 25 bp, Homo sapiens
cctgccggaggaggaaacccccgaa

SEQ ID NO: 2391 - DNA, 25 bp, Homo sapiens
ctgccggaggaggaaacccccgaac

SEQ ID NO: 2392 - DNA, 25 bp, Homo sapiens
tgccggaggaggaaacccccgaacc

SEQ ID NO: 2393 - DNA, 25 bp, Homo sapiens
gccggaggaggaaacccccgaaccc

SEQ ID NO: 2394 - DNA, 25 bp, Homo sapiens
ccggaggaggaaacccccgaaccca

SEQ ID NO: 2395 - DNA, 25 bp, Homo sapiens
cggaggaggaaacccccgaacccac

SEQ ID NO: 2396 - DNA, 25 bp, Homo sapiens
ggaggaggaaacccccgaacccacg

SEQ ID NO: 2397 - DNA, 25 bp, Homo sapiens
gaggaggaaacccccgaacccacgg

SEQ ID NO: 2398 - DNA, 25 bp, Homo sapiens
aggaggaaacccccgaacccacggc

SEQ ID NO: 2399 - DNA, 25 bp, Homo sapiens
ggaggaaacccccgaacccacggcc

SEQ ID NO: 2400 - DNA, 25 bp, Homo sapiens
gaggaaacccccgaacccacggcca

SEQ ID NO: 2401 - DNA, 25 bp, Homo sapiens
aggaaacccccgaacccacggccat

SEQ ID NO: 2402 - DNA, 25 bp, Homo sapiens
ggaaacccccgaacccacggccatc

SEQ ID NO: 2403 - DNA, 25 bp, Homo sapiens
gaaacccccgaacccacggccatct

SEQ ID NO: 2404 - DNA, 25 bp, Homo sapiens
aaacccccgaacccacggccatctg

SEQ ID NO: 2405 - DNA, 25 bp, Homo sapiens
aacccccgaacccacggccatctgc

SEQ ID NO: 2406 - DNA, 25 bp, Homo sapiens
acccccgaacccacggccatctgca

SEQ ID NO: 2407 - DNA, 25 bp, Homo sapiens
cccccgaacccacggccatctgcag

SEQ ID NO: 2408 - DNA, 25 bp, Homo sapiens
ccccgaacccacggccatctgcagg

SEQ ID NO: 2409 - DNA, 25 bp, Homo sapiens
cccgaacccacggccatctgcaggc

SEQ ID NO: 2410 - DNA, 25 bp, Homo sapiens
ccgaacccacggccatctgcaggca

SEQ ID NO: 2411 - DNA, 25 bp, Homo sapiens
cgaacccacggccatctgcaggcac

SEQ ID NO: 2412 - DNA, 25 bp, Homo sapiens
gaacccacggccatctgcaggcacc

SEQ ID NO: 2413 - DNA, 25 bp, Homo sapiens
aacccacggccatctgcaggcaccg

SEQ ID NO: 2414 - DNA, 25 bp, Homo sapiens
acccacggccatctgcaggcaccgg

SEQ ID NO: 2415 - DNA, 25 bp, Homo sapiens
cccacggccatctgcaggcaccggc

SEQ ID NO: 2416 - DNA, 25 bp, Homo sapiens
ccacggccatctgcaggcaccggca

SEQ ID NO: 2417 - DNA, 25 bp, Homo sapiens
cacggccatctgcaggcaccggcac

SEQ ID NO: 2418 - DNA, 25 bp, Homo sapiens
acggccatctgcaggcaccggcacc

SEQ ID NO: 2419 - DNA, 25 bp, Homo sapiens
cggccatctgcaggcaccggcaccg

SEQ ID NO: 2420 - DNA, 25 bp, Homo sapiens
ggccatctgcaggcaccggcaccgc

SEQ ID NO: 2421 - DNA, 25 bp, Homo sapiens
gccatctgcaggcaccggcaccgct

SEQ ID NO: 2422 - DNA, 25 bp, Homo sapiens
ccatctgcaggcaccggcaccgctg

SEQ ID NO: 2423 - DNA, 25 bp, Homo sapiens
catctgcaggcaccggcaccgctgt

SEQ ID NO: 2424 - DNA, 25 bp, Homo sapiens
atctgcaggcaccggcaccgctgtc

SEQ ID NO: 2425 - DNA, 25 bp, Homo sapiens
tctgcaggcaccggcaccgctgtca

SEQ ID NO: 2426 - DNA, 25 bp, Homo sapiens
ctgcaggcaccggcaccgctgtcac

SEQ ID NO: 2427 - DNA, 25 bp, Homo sapiens
tgcaggcaccggcaccgctgtcaca

SEQ ID NO: 2428 - DNA, 25 bp, Homo sapiens
gcaggcaccggcaccgctgtcacac

SEQ ID NO: 2429 - DNA, 25 bp, Homo sapiens
caggcaccggcaccgctgtcacacc

SEQ ID NO: 2430 - DNA, 25 bp, Homo sapiens
aggcaccggcaccgctgtcacaccg

SEQ ID NO: 2431 - DNA, 25 bp, Homo sapiens
ggcaccggcaccgctgtcacaccga

SEQ ID NO: 2432 - DNA, 25 bp, Homo sapiens
gcaccggcaccgctgtcacaccgac

SEQ ID NO: 2433 - DNA, 25 bp, Homo sapiens
caccggcaccgctgtcacaccgact

SEQ ID NO: 2434 - DNA, 25 bp, Homo sapiens
accggcaccgctgtcacaccgactg

SEQ ID NO: 2435 - DNA, 25 bp, Homo sapiens
ccggcaccgctgtcacaccgactgc

SEQ ID NO: 2436 - DNA, 25 bp, Homo sapiens
cggcaccgctgtcacaccgactgcc

SEQ ID NO: 2437 - DNA, 25 bp, Homo sapiens
ggcaccgctgtcacaccgactgcct

SEQ ID NO: 2438 - DNA, 25 bp, Homo sapiens
gcaccgctgtcacaccgactgccta

SEQ ID NO: 2439 - DNA, 25 bp, Homo sapiens
caccgctgtcacaccgactgcctag

SEQ ID NO: 2440 - DNA, 25 bp, Homo sapiens
accgctgtcacaccgactgcctaga

SEQ ID NO: 2441 - DNA, 25 bp, Homo sapiens
ccgctgtcacaccgactgcctagag

SEQ ID NO: 2442 - DNA, 25 bp, Homo sapiens
cgctgtcacaccgactgcctagagg

SEQ ID NO: 2443 - DNA, 25 bp, Homo sapiens
gctgtcacaccgactgcctagaggg

SEQ ID NO: 2444 - DNA, 25 bp, Homo sapiens
ctgtcacaccgactgcctagagggg

SEQ ID NO: 2445 - DNA, 25 bp, Homo sapiens
tgtcacaccgactgcctagaggggc

SEQ ID NO: 2446 - DNA, 25 bp, Homo sapiens
gtcacaccgactgcctagaggggct

SEQ ID NO: 2447 - DNA, 25 bp, Homo sapiens
tcacaccgactgcctagaggggctg

SEQ ID NO: 2448 - DNA, 25 bp, Homo sapiens
cacaccgactgcctagaggggctgc

SEQ ID NO: 2449 - DNA, 25 bp, Homo sapiens
acaccgactgcctagaggggctgct

SEQ ID NO: 2450 - DNA, 25 bp, Homo sapiens
caccgactgcctagaggggctgctg

SEQ ID NO: 2451 - DNA, 25 bp, Homo sapiens
accgactgcctagaggggctgctgt

SEQ ID NO: 2452 - DNA, 25 bp, Homo sapiens
ccgactgcctagaggggctgctgtc

SEQ ID NO: 2453 - DNA, 25 bp, Homo sapiens
cgactgcctagaggggctgctgtcc

SEQ ID NO: 2454 - DNA, 25 bp, Homo sapiens
gactgcctagaggggctgctgtccc

SEQ ID NO: 2455 - DNA, 25 bp, Homo sapiens
actgcctagaggggctgctgtcccg

SEQ ID NO: 2456 - DNA, 25 bp, Homo sapiens
ctgcctagaggggctgctgtcccgc

SEQ ID NO: 2457 - DNA, 25 bp, Homo sapiens
tgcctagaggggctgctgtcccgca

SEQ ID NO: 2458 - DNA, 25 bp, Homo sapiens
gcctagaggggctgctgtcccgcac

SEQ ID NO: 2459 - DNA, 25 bp, Homo sapiens
cctagaggggctgctgtcccgcacc

SEQ ID NO: 2460 - DNA, 25 bp, Homo sapiens
ctagaggggctgctgtcccgcacct

SEQ ID NO: 2461 - DNA, 25 bp, Homo sapiens
tagaggggctgctgtcccgcacctt

SEQ ID NO: 2462 - DNA, 25 bp, Homo sapiens
agaggggctgctgtcccgcaccttc

SEQ ID NO: 2463 - DNA, 25 bp, Homo sapiens
gaggggctgctgtcccgcaccttcc

SEQ ID NO: 2464 - DNA, 25 bp, Homo sapiens
aggggctgctgtcccgcaccttcca

SEQ ID NO: 2465 - DNA, 25 bp, Homo sapiens
ggggctgctgtcccgcaccttccag

SEQ ID NO: 2466 - DNA, 25 bp, Homo sapiens
gggctgctgtcccgcaccttccagt

SEQ ID NO: 2467 - DNA, 25 bp, Homo sapiens
ggctgctgtcccgcaccttccagtg

SEQ ID NO: 2468 - DNA, 25 bp, Homo sapiens
gctgctgtcccgcaccttccagtgg

SEQ ID NO: 2469 - DNA, 25 bp, Homo sapiens
ctgctgtcccgcaccttccagtggc

SEQ ID NO: 2470 - DNA, 25 bp, Homo sapiens
tgctgtcccgcaccttccagtggct

SEQ ID NO: 2471 - DNA, 25 bp, Homo sapiens
gctgtcccgcaccttccagtggctg

SEQ ID NO: 2472 - DNA, 25 bp, Homo sapiens
ctgtcccgcaccttccagtggctgg

SEQ ID NO: 2473 - DNA, 25 bp, Homo sapiens
tgtcccgcaccttccagtggctggg

SEQ ID NO: 2474 - DNA, 25 bp, Homo sapiens
gtcccgcaccttccagtggctgggg

SEQ ID NO: 2475 - DNA, 25 bp, Homo sapiens
tcccgcaccttccagtggctggggt

SEQ ID NO: 2476 - DNA, 25 bp, Homo sapiens
cccgcaccttccagtggctggggtg

SEQ ID NO: 2477 - DNA, 25 bp, Homo sapiens
ccgcaccttccagtggctggggtgg

SEQ ID NO: 2478 - DNA, 25 bp, Homo sapiens
cgcaccttccagtggctggggtggc

SEQ ID NO: 2479 - DNA, 25 bp, Homo sapiens
gcaccttccagtggctggggtggca

SEQ ID NO: 2480 - DNA, 25 bp, Homo sapiens
caccttccagtggctggggtggcag

SEQ ID NO: 2481 - DNA, 25 bp, Homo sapiens
accttccagtggctggggtggcagg

SEQ ID NO: 2482 - DNA, 25 bp, Homo sapiens
ccttccagtggctggggtggcaggt

SEQ ID NO: 2483 - DNA, 25 bp, Homo sapiens
cttccagtggctggggtggcaggtg

SEQ ID NO: 2484 - DNA, 25 bp, Homo sapiens
ttccagtggctggggtggcaggtgg

SEQ ID NO: 2485 - DNA, 25 bp, Homo sapiens
tccagtggctggggtggcaggtggg

SEQ ID NO: 2486 - DNA, 25 bp, Homo sapiens
ccagtggctggggtggcaggtgggc

SEQ ID NO: 2487 - DNA, 25 bp, Homo sapiens
cagtggctggggtggcaggtgggcg

SEQ ID NO: 2488 - DNA, 25 bp, Homo sapiens
agtggctggggtggcaggtgggcgc

SEQ ID NO: 2489 - DNA, 25 bp, Homo sapiens
gtggctggggtggcaggtgggcgcg

SEQ ID NO: 2490 - DNA, 25 bp, Homo sapiens
tggctggggtggcaggtgggcgcgc

SEQ ID NO: 2491 - DNA, 25 bp, Homo sapiens
ggctggggtggcaggtgggcgcgca

SEQ ID NO: 2492 - DNA, 25 bp, Homo sapiens
gctggggtggcaggtgggcgcgcac

SEQ ID NO: 2493 - DNA, 25 bp, Homo sapiens
ctggggtggcaggtgggcgcgcacc

SEQ ID NO: 2494 - DNA, 25 bp, Homo sapiens
tggggtggcaggtgggcgcgcaccc

SEQ ID NO: 2495 - DNA, 25 bp, Homo sapiens
ggggtggcaggtgggcgcgcacccc

SEQ ID NO: 2496 - DNA, 25 bp, Homo sapiens
gggtggcaggtgggcgcgcacccct

SEQ ID NO: 2497 - DNA, 25 bp, Homo sapiens
ggtggcaggtgggcgcgcacccctg

SEQ ID NO: 2498 - DNA, 25 bp, Homo sapiens
gtggcaggtgggcgcgcacccctgg

SEQ ID NO: 2499 - DNA, 25 bp, Homo sapiens
tggcaggtgggcgcgcacccctgga

SEQ ID NO: 2500 - DNA, 25 bp, Homo sapiens
ggcaggtgggcgcgcacccctggat

SEQ ID NO: 2501 - DNA, 25 bp, Homo sapiens
gcaggtgggcgcgcacccctggatc

SEQ ID NO: 2502 - DNA, 25 bp, Homo sapiens
caggtgggcgcgcacccctggatct

SEQ ID NO: 2503 - DNA, 25 bp, Homo sapiens
aggtgggcgcgcacccctggatctt

SEQ ID NO: 2504 - DNA, 25 bp, Homo sapiens
ggtgggcgcgcacccctggatcttc

SEQ ID NO: 2505 - DNA, 25 bp, Homo sapiens
gtgggcgcgcacccctggatcttcc

SEQ ID NO: 2506 - DNA, 25 bp, Homo sapiens
tgggcgcgcacccctggatcttcct

SEQ ID NO: 2507 - DNA, 25 bp, Homo sapiens
gggcgcgcacccctggatcttcctg

SEQ ID NO: 2508 - DNA, 25 bp, Homo sapiens
ggcgcgcacccctggatcttcctgc

SEQ ID NO: 2509 - DNA, 25 bp, Homo sapiens
gcgcgcacccctggatcttcctgct

SEQ ID NO: 2510 - DNA, 25 bp, Homo sapiens
cgcgcacccctggatcttcctgctg

SEQ ID NO: 2511 - DNA, 25 bp, Homo sapiens
gcgcacccctggatcttcctgctgg

SEQ ID NO: 2512 - DNA, 25 bp, Homo sapiens
cgcacccctggatcttcctgctggc

SEQ ID NO: 2513 - DNA, 25 bp, Homo sapiens
gcacccctggatcttcctgctggcg

SEQ ID NO: 2514 - DNA, 25 bp, Homo sapiens
cacccctggatcttcctgctggcgc

SEQ ID NO: 2515 - DNA, 25 bp, Homo sapiens
acccctggatcttcctgctggcgcc

SEQ ID NO: 2516 - DNA, 25 bp, Homo sapiens
cccctggatcttcctgctggcgccc

SEQ ID NO: 2517 - DNA, 25 bp, Homo sapiens
ccctggatcttcctgctggcgccct

SEQ ID NO: 2518 - DNA, 25 bp, Homo sapiens
cctggatcttcctgctggcgccctt

SEQ ID NO: 2519 - DNA, 25 bp, Homo sapiens
ctggatcttcctgctggcgcccttg

SEQ ID NO: 2520 - DNA, 25 bp, Homo sapiens
tggatcttcctgctggcgcccttga

SEQ ID NO: 2521 - DNA, 25 bp, Homo sapiens
ggatcttcctgctggcgcccttgat

SEQ ID NO: 2522 - DNA, 25 bp, Homo sapiens
gatcttcctgctggcgcccttgatg

SEQ ID NO: 2523 - DNA, 25 bp, Homo sapiens
atcttcctgctggcgcccttgatgc

SEQ ID NO: 2524 - DNA, 25 bp, Homo sapiens
tcttcctgctggcgcccttgatgct

SEQ ID NO: 2525 - DNA, 25 bp, Homo sapiens
cttcctgctggcgcccttgatgctg

SEQ ID NO: 2526 - DNA, 25 bp, Homo sapiens
ttcctgctggcgcccttgatgctga

SEQ ID NO: 2527 - DNA, 25 bp, Homo sapiens
tcctgctggcgcccttgatgctgac

SEQ ID NO: 2528 - DNA, 25 bp, Homo sapiens
cctgctggcgcccttgatgctgaca

SEQ ID NO: 2529 - DNA, 25 bp, Homo sapiens
ctgctggcgcccttgatgctgacag

SEQ ID NO: 2530 - DNA, 25 bp, Homo sapiens
tgctggcgcccttgatgctgacagc

SEQ ID NO: 2531 - DNA, 25 bp, Homo sapiens
gctggcgcccttgatgctgacagcc

SEQ ID NO: 2532 - DNA, 25 bp, Homo sapiens
ctggcgcccttgatgctgacagccg

SEQ ID NO: 2533 - DNA, 25 bp, Homo sapiens
tggcgcccttgatgctgacagccgc

SEQ ID NO: 2534 - DNA, 25 bp, Homo sapiens
ggcgcccttgatgctgacagccgcg

SEQ ID NO: 2535 - DNA, 25 bp, Homo sapiens
gcgcccttgatgctgacagccgcgc

SEQ ID NO: 2536 - DNA, 25 bp, Homo sapiens
cgcccttgatgctgacagccgcgct

SEQ ID NO: 2537 - DNA, 25 bp, Homo sapiens
gcccttgatgctgacagccgcgctg

SEQ ID NO: 2538 - DNA, 25 bp, Homo sapiens
cccttgatgctgacagccgcgctgg

SEQ ID NO: 2539 - DNA, 25 bp, Homo sapiens
ccttgatgctgacagccgcgctggg

SEQ ID NO: 2540 - DNA, 25 bp, Homo sapiens
cttgatgctgacagccgcgctgggc

SEQ ID NO: 2541 - DNA, 25 bp, Homo sapiens
ttgatgctgacagccgcgctgggca

SEQ ID NO: 2542 - DNA, 25 bp, Homo sapiens
tgatgctgacagccgcgctgggcac

SEQ ID NO: 2543 - DNA, 25 bp, Homo sapiens
gatgctgacagccgcgctgggcacc

SEQ ID NO: 2544 - DNA, 25 bp, Homo sapiens
atgctgacagccgcgctgggcaccg

SEQ ID NO: 2545 - DNA, 25 bp, Homo sapiens
tgctgacagccgcgctgggcaccgg

SEQ ID NO: 2546 - DNA, 25 bp, Homo sapiens
gctgacagccgcgctgggcaccggc

SEQ ID NO: 2547 - DNA, 25 bp, Homo sapiens
ctgacagccgcgctgggcaccggct

SEQ ID NO: 2548 - DNA, 25 bp, Homo sapiens
tgacagccgcgctgggcaccggctt

SEQ ID NO: 2549 - DNA, 25 bp, Homo sapiens
gacagccgcgctgggcaccggcttc

SEQ ID NO: 2550 - DNA, 25 bp, Homo sapiens
acagccgcgctgggcaccggcttcc

SEQ ID NO: 2551 - DNA, 25 bp, Homo sapiens
cagccgcgctgggcaccggcttcct

SEQ ID NO: 2552 - DNA, 25 bp, Homo sapiens
agccgcgctgggcaccggcttcctg

SEQ ID NO: 2553 - DNA, 25 bp, Homo sapiens
gccgcgctgggcaccggcttcctgt

SEQ ID NO: 2554 - DNA, 25 bp, Homo sapiens
ccgcgctgggcaccggcttcctgta

SEQ ID NO: 2555 - DNA, 25 bp, Homo sapiens
cgcgctgggcaccggcttcctgtac

SEQ ID NO: 2556 - DNA, 25 bp, Homo sapiens
gcgctgggcaccggcttcctgtacc

SEQ ID NO: 2557 - DNA, 25 bp, Homo sapiens
cgctgggcaccggcttcctgtacct

SEQ ID NO: 2558 - DNA, 25 bp, Homo sapiens
gctgggcaccggcttcctgtaccta

SEQ ID NO: 2559 - DNA, 25 bp, Homo sapiens
ctgggcaccggcttcctgtacctac

SEQ ID NO: 2560 - DNA, 25 bp, Homo sapiens
tgggcaccggcttcctgtacctacc

SEQ ID NO: 2561 - DNA, 25 bp, Homo sapiens
gggcaccggcttcctgtacctaccc

SEQ ID NO: 2562 - DNA, 25 bp, Homo sapiens
ggcaccggcttcctgtacctaccca

SEQ ID NO: 2563 - DNA, 25 bp, Homo sapiens
gcaccggcttcctgtacctacccaa

SEQ ID NO: 2564 - DNA, 25 bp, Homo sapiens
caccggcttcctgtacctacccaag

SEQ ID NO: 2565 - DNA, 25 bp, Homo sapiens
accggcttcctgtacctacccaagg

SEQ ID NO: 2566 - DNA, 25 bp, Homo sapiens
ccggcttcctgtacctacccaagga

SEQ ID NO: 2567 - DNA, 25 bp, Homo sapiens
cggcttcctgtacctacccaaggac

SEQ ID NO: 2568 - DNA, 25 bp, Homo sapiens
ggcttcctgtacctacccaaggacg

SEQ ID NO: 2569 - DNA, 25 bp, Homo sapiens
gcttcctgtacctacccaaggacga

SEQ ID NO: 2570 - DNA, 25 bp, Homo sapiens
cttcctgtacctacccaaggacgaa

SEQ ID NO: 2571 - DNA, 25 bp, Homo sapiens
ttcctgtacctacccaaggacgaag

SEQ ID NO: 2572 - DNA, 25 bp, Homo sapiens
tcctgtacctacccaaggacgaaga

SEQ ID NO: 2573 - DNA, 25 bp, Homo sapiens
cctgtacctacccaaggacgaagag

SEQ ID NO: 2574 - DNA, 25 bp, Homo sapiens
ctgtacctacccaaggacgaagagg

SEQ ID NO: 2575 - DNA, 25 bp, Homo sapiens
tgtacctacccaaggacgaagagga

SEQ ID NO: 2576 - DNA, 25 bp, Homo sapiens
gtacctacccaaggacgaagaggaa

SEQ ID NO: 2577 - DNA, 25 bp, Homo sapiens
tacctacccaaggacgaagaggaag

SEQ ID NO: 2578 - DNA, 25 bp, Homo sapiens
acctacccaaggacgaagaggaaga

SEQ ID NO: 2579 - DNA, 25 bp, Homo sapiens
cctacccaaggacgaagaggaagac

SEQ ID NO: 2580 - DNA, 25 bp, Homo sapiens
ctacccaaggacgaagaggaagacc

SEQ ID NO: 2581 - DNA, 25 bp, Homo sapiens
tacccaaggacgaagaggaagacct

SEQ ID NO: 2582 - DNA, 25 bp, Homo sapiens
acccaaggacgaagaggaagaccta

SEQ ID NO: 2583 - DNA, 25 bp, Homo sapiens
cccaaggacgaagaggaagacctag

SEQ ID NO: 2584 - DNA, 25 bp, Homo sapiens
ccaaggacgaagaggaagacctaga

SEQ ID NO: 2585 - DNA, 25 bp, Homo sapiens
caaggacgaagaggaagacctagag

SEQ ID NO: 2586 - DNA, 25 bp, Homo sapiens
aaggacgaagaggaagacctagagg

SEQ ID NO: 2587 - DNA, 25 bp, Homo sapiens
aggacgaagaggaagacctagagga

SEQ ID NO: 2588 - DNA, 25 bp, Homo sapiens
ggacgaagaggaagacctagaggag

SEQ ID NO: 2589 - DNA, 25 bp, Homo sapiens
gacgaagaggaagacctagaggagc

SEQ ID NO: 2590 - DNA, 25 bp, Homo sapiens
acgaagaggaagacctagaggagca

SEQ ID NO: 2591 - DNA, 25 bp, Homo sapiens
cgaagaggaagacctagaggagcat

SEQ ID NO: 2592 - DNA, 25 bp, Homo sapiens
gaagaggaagacctagaggagcatt

SEQ ID NO: 2593 - DNA, 25 bp, Homo sapiens
aagaggaagacctagaggagcatta

SEQ ID NO: 2594 - DNA, 25 bp, Homo sapiens
agaggaagacctagaggagcattac

SEQ ID NO: 2595 - DNA, 25 bp, Homo sapiens
gaggaagacctagaggagcattaca

SEQ ID NO: 2596 - DNA, 25 bp, Homo sapiens
aggaagacctagaggagcattacac

SEQ ID NO: 2597 - DNA, 25 bp, Homo sapiens
ggaagacctagaggagcattacacc

SEQ ID NO: 2598 - DNA, 25 bp, Homo sapiens
gaagacctagaggagcattacaccc

SEQ ID NO: 2599 - DNA, 25 bp, Homo sapiens
aagacctagaggagcattacacccc

SEQ ID NO: 2600 - DNA, 25 bp, Homo sapiens
agacctagaggagcattacacccct

SEQ ID NO: 2601 - DNA, 25 bp, Homo sapiens
gacctagaggagcattacacccctg

SEQ ID NO: 2602 - DNA, 25 bp, Homo sapiens
acctagaggagcattacacccctgt

SEQ ID NO: 2603 - DNA, 25 bp, Homo sapiens
cctagaggagcattacacccctgtg

SEQ ID NO: 2604 - DNA, 25 bp, Homo sapiens
ctagaggagcattacacccctgtgg

SEQ ID NO: 2605 - DNA, 25 bp, Homo sapiens
tagaggagcattacacccctgtggg

SEQ ID NO: 2606 - DNA, 25 bp, Homo sapiens
agaggagcattacacccctgtgggg

SEQ ID NO: 2607 - DNA, 25 bp, Homo sapiens
gaggagcattacacccctgtgggga

SEQ ID NO: 2608 - DNA, 25 bp, Homo sapiens
aggagcattacacccctgtggggag

SEQ ID NO: 2609 - DNA, 25 bp, Homo sapiens
ggagcattacacccctgtggggagc

SEQ ID NO: 2610 - DNA, 25 bp, Homo sapiens
gagcattacacccctgtggggagcc

SEQ ID NO: 2611 - DNA, 25 bp, Homo sapiens
agcattacacccctgtggggagccc

SEQ ID NO: 2612 - DNA, 25 bp, Homo sapiens
gcattacacccctgtggggagcccg

SEQ ID NO: 2613 - DNA, 25 bp, Homo sapiens
cattacacccctgtggggagcccgg

SEQ ID NO: 2614 - DNA, 25 bp, Homo sapiens
attacacccctgtggggagcccggc

SEQ ID NO: 2615 - DNA, 25 bp, Homo sapiens
ttacacccctgtggggagcccggcc

SEQ ID NO: 2616 - DNA, 25 bp, Homo sapiens
tacacccctgtggggagcccggcca

SEQ ID NO: 2617 - DNA, 25 bp, Homo sapiens
acacccctgtggggagcccggccaa

SEQ ID NO: 2618 - DNA, 25 bp, Homo sapiens
cacccctgtggggagcccggccaag

SEQ ID NO: 2619 - DNA, 25 bp, Homo sapiens
acccctgtggggagcccggccaagg

SEQ ID NO: 2620 - DNA, 25 bp, Homo sapiens
cccctgtggggagcccggccaaggc

SEQ ID NO: 2621 - DNA, 25 bp, Homo sapiens
ccctgtggggagcccggccaaggcg

SEQ ID NO: 2622 - DNA, 25 bp, Homo sapiens
cctgtggggagcccggccaaggcgg

SEQ ID NO: 2623 - DNA, 25 bp, Homo sapiens
ctgtggggagcccggccaaggcgga

SEQ ID NO: 2624 - DNA, 25 bp, Homo sapiens
tgtggggagcccggccaaggcggag

SEQ ID NO: 2625 - DNA, 25 bp, Homo sapiens
gtggggagcccggccaaggcggagc

SEQ ID NO: 2626 - DNA, 25 bp, Homo sapiens
tggggagcccggccaaggcggagcg

SEQ ID NO: 2627 - DNA, 25 bp, Homo sapiens
ggggagcccggccaaggcggagcgg

SEQ ID NO: 2628 - DNA, 25 bp, Homo sapiens
gggagcccggccaaggcggagcggc

SEQ ID NO: 2629 - DNA, 25 bp, Homo sapiens
ggagcccggccaaggcggagcggcg

SEQ ID NO: 2630 - DNA, 25 bp, Homo sapiens
gagcccggccaaggcggagcggcgc

SEQ ID NO: 2631 - DNA, 25 bp, Homo sapiens
agcccggccaaggcggagcggcgct

SEQ ID NO: 2632 - DNA, 25 bp, Homo sapiens
gcccggccaaggcggagcggcgctt

SEQ ID NO: 2633 - DNA, 25 bp, Homo sapiens
cccggccaaggcggagcggcgcttc

SEQ ID NO: 2634 - DNA, 25 bp, Homo sapiens
ccggccaaggcggagcggcgcttcg

SEQ ID NO: 2635 - DNA, 25 bp, Homo sapiens
cggccaaggcggagcggcgcttcgt

SEQ ID NO: 2636 - DNA, 25 bp, Homo sapiens
ggccaaggcggagcggcgcttcgtg

SEQ ID NO: 2637 - DNA, 25 bp, Homo sapiens
gccaaggcggagcggcgcttcgtgc

SEQ ID NO: 2638 - DNA, 25 bp, Homo sapiens
ccaaggcggagcggcgcttcgtgca

SEQ ID NO: 2639 - DNA, 25 bp, Homo sapiens
caaggcggagcggcgcttcgtgcag

SEQ ID NO: 2640 - DNA, 25 bp, Homo sapiens
aaggcggagcggcgcttcgtgcagg

SEQ ID NO: 2641 - DNA, 25 bp, Homo sapiens
aggcggagcggcgcttcgtgcaggg

SEQ ID NO: 2642 - DNA, 25 bp, Homo sapiens
ggcggagcggcgcttcgtgcagggc

SEQ ID NO: 2643 - DNA, 25 bp, Homo sapiens
gcggagcggcgcttcgtgcagggcc

SEQ ID NO: 2644 - DNA, 25 bp, Homo sapiens
cggagcggcgcttcgtgcagggcca

SEQ ID NO: 2645 - DNA, 25 bp, Homo sapiens
ggagcggcgcttcgtgcagggccat

SEQ ID NO: 2646 - DNA, 25 bp, Homo sapiens
gagcggcgcttcgtgcagggccatt

SEQ ID NO: 2647 - DNA, 25 bp, Homo sapiens
agcggcgcttcgtgcagggccattt

SEQ ID NO: 2648 - DNA, 25 bp, Homo sapiens
gcggcgcttcgtgcagggccatttc

SEQ ID NO: 2649 - DNA, 25 bp, Homo sapiens
cggcgcttcgtgcagggccatttca

SEQ ID NO: 2650 - DNA, 25 bp, Homo sapiens
ggcgcttcgtgcagggccatttcac

SEQ ID NO: 2651 - DNA, 25 bp, Homo sapiens
gcgcttcgtgcagggccatttcacc

SEQ ID NO: 2652 - DNA, 25 bp, Homo sapiens
cgcttcgtgcagggccatttcacca

SEQ ID NO: 2653 - DNA, 25 bp, Homo sapiens
gcttcgtgcagggccatttcaccac

SEQ ID NO: 2654 - DNA, 25 bp, Homo sapiens
cttcgtgcagggccatttcaccacc

SEQ ID NO: 2655 - DNA, 25 bp, Homo sapiens
ttcgtgcagggccatttcaccacca

SEQ ID NO: 2656 - DNA, 25 bp, Homo sapiens
tcgtgcagggccatttcaccaccaa

SEQ ID NO: 2657 - DNA, 25 bp, Homo sapiens
cgtgcagggccatttcaccaccaac

SEQ ID NO: 2658 - DNA, 25 bp, Homo sapiens
gtgcagggccatttcaccaccaacg

SEQ ID NO: 2659 - DNA, 25 bp, Homo sapiens
tgcagggccatttcaccaccaacga

SEQ ID NO: 2660 - DNA, 25 bp, Homo sapiens
gcagggccatttcaccaccaacgac

SEQ ID NO: 2661 - DNA, 25 bp, Homo sapiens
cagggccatttcaccaccaacgact

SEQ ID NO: 2662 - DNA, 25 bp, Homo sapiens
agggccatttcaccaccaacgactc

SEQ ID NO: 2663 - DNA, 25 bp, Homo sapiens
gggccatttcaccaccaacgactcc

SEQ ID NO: 2664 - DNA, 25 bp, Homo sapiens
ggccatttcaccaccaacgactcct

SEQ ID NO: 2665 - DNA, 25 bp, Homo sapiens
gccatttcaccaccaacgactccta

SEQ ID NO: 2666 - DNA, 25 bp, Homo sapiens
ccatttcaccaccaacgactcctac

SEQ ID NO: 2667 - DNA, 25 bp, Homo sapiens
catttcaccaccaacgactcctacc

SEQ ID NO: 2668 - DNA, 25 bp, Homo sapiens
atttcaccaccaacgactcctaccg

SEQ ID NO: 2669 - DNA, 25 bp, Homo sapiens
tttcaccaccaacgactcctaccgc

SEQ ID NO: 2670 - DNA, 25 bp, Homo sapiens
ttcaccaccaacgactcctaccgct

SEQ ID NO: 2671 - DNA, 25 bp, Homo sapiens
tcaccaccaacgactcctaccgctt

SEQ ID NO: 2672 - DNA, 25 bp, Homo sapiens
caccaccaacgactcctaccgcttc

SEQ ID NO: 2673 - DNA, 25 bp, Homo sapiens
accaccaacgactcctaccgcttct

SEQ ID NO: 2674 - DNA, 25 bp, Homo sapiens
ccaccaacgactcctaccgcttctc

SEQ ID NO: 2675 - DNA, 25 bp, Homo sapiens
caccaacgactcctaccgcttctcc

SEQ ID NO: 2676 - DNA, 25 bp, Homo sapiens
accaacgactcctaccgcttctccg

SEQ ID NO: 2677 - DNA, 25 bp, Homo sapiens
ccaacgactcctaccgcttctccgc

SEQ ID NO: 2678 - DNA, 25 bp, Homo sapiens
caacgactcctaccgcttctccgcc

SEQ ID NO: 2679 - DNA, 25 bp, Homo sapiens
aacgactcctaccgcttctccgcct

SEQ ID NO: 2680 - DNA, 25 bp, Homo sapiens
acgactcctaccgcttctccgcctc

SEQ ID NO: 2681 - DNA, 25 bp, Homo sapiens
cgactcctaccgcttctccgcctcc

SEQ ID NO: 2682 - DNA, 25 bp, Homo sapiens
gactcctaccgcttctccgcctcca

SEQ ID NO: 2683 - DNA, 25 bp, Homo sapiens
actcctaccgcttctccgcctccag

SEQ ID NO: 2684 - DNA, 25 bp, Homo sapiens
ctcctaccgcttctccgcctccagg

SEQ ID NO: 2685 - DNA, 25 bp, Homo sapiens
tcctaccgcttctccgcctccagga

SEQ ID NO: 2686 - DNA, 25 bp, Homo sapiens
cctaccgcttctccgcctccaggag

SEQ ID NO: 2687 - DNA, 25 bp, Homo sapiens
ctaccgcttctccgcctccaggagg

SEQ ID NO: 2688 - DNA, 25 bp, Homo sapiens
taccgcttctccgcctccaggagga

SEQ ID NO: 2689 - DNA, 25 bp, Homo sapiens
accgcttctccgcctccaggaggag

SEQ ID NO: 2690 - DNA, 25 bp, Homo sapiens
ccgcttctccgcctccaggaggagc

SEQ ID NO: 2691 - DNA, 25 bp, Homo sapiens
cgcttctccgcctccaggaggagca

SEQ ID NO: 2692 - DNA, 25 bp, Homo sapiens
gcttctccgcctccaggaggagcac

SEQ ID NO: 2693 - DNA, 25 bp, Homo sapiens
cttctccgcctccaggaggagcacc

SEQ ID NO: 2694 - DNA, 25 bp, Homo sapiens
ttctccgcctccaggaggagcaccg

SEQ ID NO: 2695 - DNA, 25 bp, Homo sapiens
tctccgcctccaggaggagcaccga

SEQ ID NO: 2696 - DNA, 25 bp, Homo sapiens
ctccgcctccaggaggagcaccgaa

SEQ ID NO: 2697 - DNA, 25 bp, Homo sapiens
tccgcctccaggaggagcaccgaag

SEQ ID NO: 2698 - DNA, 25 bp, Homo sapiens
ccgcctccaggaggagcaccgaagc

SEQ ID NO: 2699 - DNA, 25 bp, Homo sapiens
cgcctccaggaggagcaccgaagcc

SEQ ID NO: 2700 - DNA, 25 bp, Homo sapiens
gcctccaggaggagcaccgaagcca

SEQ ID NO: 2701 - DNA, 25 bp, Homo sapiens
cctccaggaggagcaccgaagccaa

SEQ ID NO: 2702 - DNA, 25 bp, Homo sapiens
ctccaggaggagcaccgaagccaat

SEQ ID NO: 2703 - DNA, 25 bp, Homo sapiens
tccaggaggagcaccgaagccaatt

SEQ ID NO: 2704 - DNA, 25 bp, Homo sapiens
ccaggaggagcaccgaagccaattt

SEQ ID NO: 2705 - DNA, 25 bp, Homo sapiens
caggaggagcaccgaagccaatttc

SEQ ID NO: 2706 - DNA, 25 bp, Homo sapiens
aggaggagcaccgaagccaatttcg

SEQ ID NO: 2707 - DNA, 25 bp, Homo sapiens
ggaggagcaccgaagccaatttcgt

SEQ ID NO: 2708 - DNA, 25 bp, Homo sapiens
gaggagcaccgaagccaatttcgtc

SEQ ID NO: 2709 - DNA, 25 bp, Homo sapiens
aggagcaccgaagccaatttcgtct

SEQ ID NO: 2710 - DNA, 25 bp, Homo sapiens
ggagcaccgaagccaatttcgtctc

SEQ ID NO: 2711 - DNA, 25 bp, Homo sapiens
gagcaccgaagccaatttcgtctcg

SEQ ID NO: 2712 - DNA, 25 bp, Homo sapiens
agcaccgaagccaatttcgtctcgc

SEQ ID NO: 2713 - DNA, 25 bp, Homo sapiens
gcaccgaagccaatttcgtctcgct

SEQ ID NO: 2714 - DNA, 25 bp, Homo sapiens
caccgaagccaatttcgtctcgctt

SEQ ID NO: 2715 - DNA, 25 bp, Homo sapiens
accgaagccaatttcgtctcgcttc

SEQ ID NO: 2716 - DNA, 25 bp, Homo sapiens
ccgaagccaatttcgtctcgcttct

SEQ ID NO: 2717 - DNA, 25 bp, Homo sapiens
cgaagccaatttcgtctcgcttctg

SEQ ID NO: 2718 - DNA, 25 bp, Homo sapiens
gaagccaatttcgtctcgcttctgg

SEQ ID NO: 2719 - DNA, 25 bp, Homo sapiens
aagccaatttcgtctcgcttctggt

SEQ ID NO: 2720 - DNA, 25 bp, Homo sapiens
agccaatttcgtctcgcttctggtg

SEQ ID NO: 2721 - DNA, 25 bp, Homo sapiens
gccaatttcgtctcgcttctggtgg

SEQ ID NO: 2722 - DNA, 25 bp, Homo sapiens
ccaatttcgtctcgcttctggtggt

SEQ ID NO: 2723 - DNA, 25 bp, Homo sapiens
caatttcgtctcgcttctggtggtc

SEQ ID NO: 2724 - DNA, 25 bp, Homo sapiens
aatttcgtctcgcttctggtggtct

SEQ ID NO: 2725 - DNA, 25 bp, Homo sapiens
atttcgtctcgcttctggtggtctc

SEQ ID NO: 2726 - DNA, 25 bp, Homo sapiens
tttcgtctcgcttctggtggtctcc

SEQ ID NO: 2727 - DNA, 25 bp, Homo sapiens
ttcgtctcgcttctggtggtctcct

SEQ ID NO: 2728 - DNA, 25 bp, Homo sapiens
tcgtctcgcttctggtggtctccta

SEQ ID NO: 2729 - DNA, 25 bp, Homo sapiens
cgtctcgcttctggtggtctcctac

SEQ ID NO: 2730 - DNA, 25 bp, Homo sapiens
gtctcgcttctggtggtctcctaca

SEQ ID NO: 2731 - DNA, 25 bp, Homo sapiens
tctcgcttctggtggtctcctacag

SEQ ID NO: 2732 - DNA, 25 bp, Homo sapiens
ctcgcttctggtggtctcctacagc

SEQ ID NO: 2733 - DNA, 25 bp, Homo sapiens
tcgcttctggtggtctcctacagcg

SEQ ID NO: 2734 - DNA, 25 bp, Homo sapiens
cgcttctggtggtctcctacagcga

SEQ ID NO: 2735 - DNA, 25 bp, Homo sapiens
gcttctggtggtctcctacagcgac

SEQ ID NO: 2736 - DNA, 25 bp, Homo sapiens
cttctggtggtctcctacagcgact

SEQ ID NO: 2737 - DNA, 25 bp, Homo sapiens
ttctggtggtctcctacagcgactc

SEQ ID NO: 2738 - DNA, 25 bp, Homo sapiens
tctggtggtctcctacagcgactca

SEQ ID NO: 2739 - DNA, 25 bp, Homo sapiens
ctggtggtctcctacagcgactcac

SEQ ID NO: 2740 - DNA, 25 bp, Homo sapiens
tggtggtctcctacagcgactcact

SEQ ID NO: 2741 - DNA, 25 bp, Homo sapiens
ggtggtctcctacagcgactcactg

SEQ ID NO: 2742 - DNA, 25 bp, Homo sapiens
gtggtctcctacagcgactcactgc

SEQ ID NO: 2743 - DNA, 25 bp, Homo sapiens
tggtctcctacagcgactcactgct

SEQ ID NO: 2744 - DNA, 25 bp, Homo sapiens
ggtctcctacagcgactcactgctg

SEQ ID NO: 2745 - DNA, 25 bp, Homo sapiens
gtctcctacagcgactcactgctgg

SEQ ID NO: 2746 - DNA, 25 bp, Homo sapiens
tctcctacagcgactcactgctgga

SEQ ID NO: 2747 - DNA, 25 bp, Homo sapiens
ctcctacagcgactcactgctggac

SEQ ID NO: 2748 - DNA, 25 bp, Homo sapiens
tcctacagcgactcactgctggacc

SEQ ID NO: 2749 - DNA, 25 bp, Homo sapiens
cctacagcgactcactgctggaccc

SEQ ID NO: 2750 - DNA, 25 bp, Homo sapiens
ctacagcgactcactgctggaccca

SEQ ID NO: 2751 - DNA, 25 bp, Homo sapiens
tacagcgactcactgctggacccag

SEQ ID NO: 2752 - DNA, 25 bp, Homo sapiens
acagcgactcactgctggacccagc

SEQ ID NO: 2753 - DNA, 25 bp, Homo sapiens
cagcgactcactgctggacccagct

SEQ ID NO: 2754 - DNA, 25 bp, Homo sapiens
agcgactcactgctggacccagcta

SEQ ID NO: 2755 - DNA, 25 bp, Homo sapiens
gcgactcactgctggacccagctac

SEQ ID NO: 2756 - DNA, 25 bp, Homo sapiens
cgactcactgctggacccagctacc

SEQ ID NO: 2757 - DNA, 25 bp, Homo sapiens
gactcactgctggacccagctacct

SEQ ID NO: 2758 - DNA, 25 bp, Homo sapiens
actcactgctggacccagctacctt

SEQ ID NO: 2759 - DNA, 25 bp, Homo sapiens
ctcactgctggacccagctaccttt

SEQ ID NO: 2760 - DNA, 25 bp, Homo sapiens
tcactgctggacccagctacctttg

SEQ ID NO: 2761 - DNA, 25 bp, Homo sapiens
cactgctggacccagctacctttgc

SEQ ID NO: 2762 - DNA, 25 bp, Homo sapiens
actgctggacccagctacctttgca

SEQ ID NO: 2763 - DNA, 25 bp, Homo sapiens
ctgctggacccagctacctttgcag

SEQ ID NO: 2764 - DNA, 25 bp, Homo sapiens
tgctggacccagctacctttgcaga

SEQ ID NO: 2765 - DNA, 25 bp, Homo sapiens
gctggacccagctacctttgcagaa

SEQ ID NO: 2766 - DNA, 25 bp, Homo sapiens
ctggacccagctacctttgcagaag

SEQ ID NO: 2767 - DNA, 25 bp, Homo sapiens
tggacccagctacctttgcagaagt

SEQ ID NO: 2768 - DNA, 25 bp, Homo sapiens
ggacccagctacctttgcagaagtc

SEQ ID NO: 2769 - DNA, 25 bp, Homo sapiens
gacccagctacctttgcagaagtca

SEQ ID NO: 2770 - DNA, 25 bp, Homo sapiens
acccagctacctttgcagaagtcag

SEQ ID NO: 2771 - DNA, 25 bp, Homo sapiens
cccagctacctttgcagaagtcagc

SEQ ID NO: 2772 - DNA, 25 bp, Homo sapiens
ccagctacctttgcagaagtcagca

SEQ ID NO: 2773 - DNA, 25 bp, Homo sapiens
cagctacctttgcagaagtcagcaa

SEQ ID NO: 2774 - DNA, 25 bp, Homo sapiens
agctacctttgcagaagtcagcaaa

SEQ ID NO: 2775 - DNA, 25 bp, Homo sapiens
gctacctttgcagaagtcagcaaac

SEQ ID NO: 2776 - DNA, 25 bp, Homo sapiens
ctacctttgcagaagtcagcaaact

SEQ ID NO: 2777 - DNA, 25 bp, Homo sapiens
tacctttgcagaagtcagcaaactg

SEQ ID NO: 2778 - DNA, 25 bp, Homo sapiens
acctttgcagaagtcagcaaactgg

SEQ ID NO: 2779 - DNA, 25 bp, Homo sapiens
cctttgcagaagtcagcaaactgga

SEQ ID NO: 2780 - DNA, 25 bp, Homo sapiens
ctttgcagaagtcagcaaactggac

SEQ ID NO: 2781 - DNA, 25 bp, Homo sapiens
tttgcagaagtcagcaaactggacg

SEQ ID NO: 2782 - DNA, 25 bp, Homo sapiens
ttgcagaagtcagcaaactggacgg

SEQ ID NO: 2783 - DNA, 25 bp, Homo sapiens
tgcagaagtcagcaaactggacggc

SEQ ID NO: 2784 - DNA, 25 bp, Homo sapiens
gcagaagtcagcaaactggacggcg

SEQ ID NO: 2785 - DNA, 25 bp, Homo sapiens
cagaagtcagcaaactggacggcgc

SEQ ID NO: 2786 - DNA, 25 bp, Homo sapiens
agaagtcagcaaactggacggcgcg

SEQ ID NO: 2787 - DNA, 25 bp, Homo sapiens
gaagtcagcaaactggacggcgcgg

SEQ ID NO: 2788 - DNA, 25 bp, Homo sapiens
aagtcagcaaactggacggcgcggt

SEQ ID NO: 2789 - DNA, 25 bp, Homo sapiens
agtcagcaaactggacggcgcggtg

SEQ ID NO: 2790 - DNA, 25 bp, Homo sapiens
gtcagcaaactggacggcgcggtgc

SEQ ID NO: 2791 - DNA, 25 bp, Homo sapiens
tcagcaaactggacggcgcggtgca

SEQ ID NO: 2792 - DNA, 25 bp, Homo sapiens
cagcaaactggacggcgcggtgcag

SEQ ID NO: 2793 - DNA, 25 bp, Homo sapiens
agcaaactggacggcgcggtgcagg

SEQ ID NO: 2794 - DNA, 25 bp, Homo sapiens
gcaaactggacggcgcggtgcagga

SEQ ID NO: 2795 - DNA, 25 bp, Homo sapiens
caaactggacggcgcggtgcaggat

SEQ ID NO: 2796 - DNA, 25 bp, Homo sapiens
aaactggacggcgcggtgcaggatc

SEQ ID NO: 2797 - DNA, 25 bp, Homo sapiens
aactggacggcgcggtgcaggatct

SEQ ID NO: 2798 - DNA, 25 bp, Homo sapiens
actggacggcgcggtgcaggatctg

SEQ ID NO: 2799 - DNA, 25 bp, Homo sapiens
ctggacggcgcggtgcaggatctgc

SEQ ID NO: 2800 - DNA, 25 bp, Homo sapiens
tggacggcgcggtgcaggatctgcg

SEQ ID NO: 2801 - DNA, 25 bp, Homo sapiens
ggacggcgcggtgcaggatctgcgc

SEQ ID NO: 2802 - DNA, 25 bp, Homo sapiens
gacggcgcggtgcaggatctgcgcg

SEQ ID NO: 2803 - DNA, 25 bp, Homo sapiens
acggcgcggtgcaggatctgcgcgt

SEQ ID NO: 2804 - DNA, 25 bp, Homo sapiens
cggcgcggtgcaggatctgcgcgtg

SEQ ID NO: 2805 - DNA, 25 bp, Homo sapiens
ggcgcggtgcaggatctgcgcgtgg

SEQ ID NO: 2806 - DNA, 25 bp, Homo sapiens
gcgcggtgcaggatctgcgcgtggc

SEQ ID NO: 2807 - DNA, 25 bp, Homo sapiens
cgcggtgcaggatctgcgcgtggcg

SEQ ID NO: 2808 - DNA, 25 bp, Homo sapiens
gcggtgcaggatctgcgcgtggcgc

SEQ ID NO: 2809 - DNA, 25 bp, Homo sapiens
cggtgcaggatctgcgcgtggcgcg

SEQ ID NO: 2810 - DNA, 25 bp, Homo sapiens
ggtgcaggatctgcgcgtggcgcgg

SEQ ID NO: 2811 - DNA, 25 bp, Homo sapiens
gtgcaggatctgcgcgtggcgcggg

SEQ ID NO: 2812 - DNA, 25 bp, Homo sapiens
tgcaggatctgcgcgtggcgcggga

SEQ ID NO: 2813 - DNA, 25 bp, Homo sapiens
gcaggatctgcgcgtggcgcgggaa

SEQ ID NO: 2814 - DNA, 25 bp, Homo sapiens
caggatctgcgcgtggcgcgggaaa

SEQ ID NO: 2815 - DNA, 25 bp, Homo sapiens
aggatctgcgcgtggcgcgggaaaa

SEQ ID NO: 2816 - DNA, 25 bp, Homo sapiens
ggatctgcgcgtggcgcgggaaaag

SEQ ID NO: 2817 - DNA, 25 bp, Homo sapiens
gatctgcgcgtggcgcgggaaaagg

SEQ ID NO: 2818 - DNA, 25 bp, Homo sapiens
atctgcgcgtggcgcgggaaaaggg

SEQ ID NO: 2819 - DNA, 25 bp, Homo sapiens
tctgcgcgtggcgcgggaaaaggga

SEQ ID NO: 2820 - DNA, 25 bp, Homo sapiens
ctgcgcgtggcgcgggaaaagggaa

SEQ ID NO: 2821 - DNA, 25 bp, Homo sapiens
tgcgcgtggcgcgggaaaagggaag

SEQ ID NO: 2822 - DNA, 25 bp, Homo sapiens
gcgcgtggcgcgggaaaagggaagc

SEQ ID NO: 2823 - DNA, 25 bp, Homo sapiens
cgcgtggcgcgggaaaagggaagcc

SEQ ID NO: 2824 - DNA, 25 bp, Homo sapiens
gcgtggcgcgggaaaagggaagcca

SEQ ID NO: 2825 - DNA, 25 bp, Homo sapiens
cgtggcgcgggaaaagggaagccag

SEQ ID NO: 2826 - DNA, 25 bp, Homo sapiens
gtggcgcgggaaaagggaagccaga

SEQ ID NO: 2827 - DNA, 25 bp, Homo sapiens
tggcgcgggaaaagggaagccagat

SEQ ID NO: 2828 - DNA, 25 bp, Homo sapiens
ggcgcgggaaaagggaagccagatc

SEQ ID NO: 2829 - DNA, 25 bp, Homo sapiens
gcgcgggaaaagggaagccagatcc

SEQ ID NO: 2830 - DNA, 25 bp, Homo sapiens
cgcgggaaaagggaagccagatcca

SEQ ID NO: 2831 - DNA, 25 bp, Homo sapiens
gcgggaaaagggaagccagatccag

SEQ ID NO: 2832 - DNA, 25 bp, Homo sapiens
cgggaaaagggaagccagatccagt

SEQ ID NO: 2833 - DNA, 25 bp, Homo sapiens
gggaaaagggaagccagatccagta

SEQ ID NO: 2834 - DNA, 25 bp, Homo sapiens
ggaaaagggaagccagatccagtac

SEQ ID NO: 2835 - DNA, 25 bp, Homo sapiens
gaaaagggaagccagatccagtacc

SEQ ID NO: 2836 - DNA, 25 bp, Homo sapiens
aaaagggaagccagatccagtacca

SEQ ID NO: 2837 - DNA, 25 bp, Homo sapiens
aaagggaagccagatccagtaccag

SEQ ID NO: 2838 - DNA, 25 bp, Homo sapiens
aagggaagccagatccagtaccagc

SEQ ID NO: 2839 - DNA, 25 bp, Homo sapiens
agggaagccagatccagtaccagca

SEQ ID NO: 2840 - DNA, 25 bp, Homo sapiens
gggaagccagatccagtaccagcag

SEQ ID NO: 2841 - DNA, 25 bp, Homo sapiens
ggaagccagatccagtaccagcagg

SEQ ID NO: 2842 - DNA, 25 bp, Homo sapiens
gaagccagatccagtaccagcaggt

SEQ ID NO: 2843 - DNA, 25 bp, Homo sapiens
aagccagatccagtaccagcaggtg

SEQ ID NO: 2844 - DNA, 25 bp, Homo sapiens
agccagatccagtaccagcaggtgt

SEQ ID NO: 2845 - DNA, 25 bp, Homo sapiens
gccagatccagtaccagcaggtgtg

SEQ ID NO: 2846 - DNA, 25 bp, Homo sapiens
ccagatccagtaccagcaggtgtgc

SEQ ID NO: 2847 - DNA, 25 bp, Homo sapiens
cagatccagtaccagcaggtgtgcg

SEQ ID NO: 2848 - DNA, 25 bp, Homo sapiens
agatccagtaccagcaggtgtgcgc

SEQ ID NO: 2849 - DNA, 25 bp, Homo sapiens
gatccagtaccagcaggtgtgcgcg

SEQ ID NO: 2850 - DNA, 25 bp, Homo sapiens
atccagtaccagcaggtgtgcgcga

SEQ ID NO: 2851 - DNA, 25 bp, Homo sapiens
tccagtaccagcaggtgtgcgcgag

SEQ ID NO: 2852 - DNA, 25 bp, Homo sapiens
ccagtaccagcaggtgtgcgcgagg

SEQ ID NO: 2853 - DNA, 25 bp, Homo sapiens
cagtaccagcaggtgtgcgcgaggt

SEQ ID NO: 2854 - DNA, 25 bp, Homo sapiens
agtaccagcaggtgtgcgcgaggta

SEQ ID NO: 2855 - DNA, 25 bp, Homo sapiens
gtaccagcaggtgtgcgcgaggtac

SEQ ID NO: 2856 - DNA, 25 bp, Homo sapiens
taccagcaggtgtgcgcgaggtaca

SEQ ID NO: 2857 - DNA, 25 bp, Homo sapiens
accagcaggtgtgcgcgaggtacag

SEQ ID NO: 2858 - DNA, 25 bp, Homo sapiens
ccagcaggtgtgcgcgaggtacagg

SEQ ID NO: 2859 - DNA, 25 bp, Homo sapiens
cagcaggtgtgcgcgaggtacaggg

SEQ ID NO: 2860 - DNA, 25 bp, Homo sapiens
agcaggtgtgcgcgaggtacagggc

SEQ ID NO: 2861 - DNA, 25 bp, Homo sapiens
gcaggtgtgcgcgaggtacagggcg

SEQ ID NO: 2862 - DNA, 25 bp, Homo sapiens
caggtgtgcgcgaggtacagggcgc

SEQ ID NO: 2863 - DNA, 25 bp, Homo sapiens
aggtgtgcgcgaggtacagggcgct

SEQ ID NO: 2864 - DNA, 25 bp, Homo sapiens
ggtgtgcgcgaggtacagggcgctc

SEQ ID NO: 2865 - DNA, 25 bp, Homo sapiens
gtgtgcgcgaggtacagggcgctct

SEQ ID NO: 2866 - DNA, 25 bp, Homo sapiens
tgtgcgcgaggtacagggcgctctg

SEQ ID NO: 2867 - DNA, 25 bp, Homo sapiens
gtgcgcgaggtacagggcgctctgc

SEQ ID NO: 2868 - DNA, 25 bp, Homo sapiens
tgcgcgaggtacagggcgctctgcg

SEQ ID NO: 2869 - DNA, 25 bp, Homo sapiens
gcgcgaggtacagggcgctctgcgt

SEQ ID NO: 2870 - DNA, 25 bp, Homo sapiens
cgcgaggtacagggcgctctgcgtg

SEQ ID NO: 2871 - DNA, 25 bp, Homo sapiens
gcgaggtacagggcgctctgcgtgc

SEQ ID NO: 2872 - DNA, 25 bp, Homo sapiens
cgaggtacagggcgctctgcgtgcc

SEQ ID NO: 2873 - DNA, 25 bp, Homo sapiens
gaggtacagggcgctctgcgtgccc

SEQ ID NO: 2874 - DNA, 25 bp, Homo sapiens
aggtacagggcgctctgcgtgcccc

SEQ ID NO: 2875 - DNA, 25 bp, Homo sapiens
ggtacagggcgctctgcgtgccccc

SEQ ID NO: 2876 - DNA, 25 bp, Homo sapiens
gtacagggcgctctgcgtgcccccc

SEQ ID NO: 2877 - DNA, 25 bp, Homo sapiens
tacagggcgctctgcgtgcccccca

SEQ ID NO: 2878 - DNA, 25 bp, Homo sapiens
acagggcgctctgcgtgccccccaa

SEQ ID NO: 2879 - DNA, 25 bp, Homo sapiens
cagggcgctctgcgtgccccccaac

SEQ ID NO: 2880 - DNA, 25 bp, Homo sapiens
agggcgctctgcgtgccccccaacc

SEQ ID NO: 2881 - DNA, 25 bp, Homo sapiens
gggcgctctgcgtgccccccaaccc

SEQ ID NO: 2882 - DNA, 25 bp, Homo sapiens
ggcgctctgcgtgccccccaacccg

SEQ ID NO: 2883 - DNA, 25 bp, Homo sapiens
gcgctctgcgtgccccccaacccga

SEQ ID NO: 2884 - DNA, 25 bp, Homo sapiens
cgctctgcgtgccccccaacccgat

SEQ ID NO: 2885 - DNA, 25 bp, Homo sapiens
gctctgcgtgccccccaacccgatc

SEQ ID NO: 2886 - DNA, 25 bp, Homo sapiens
ctctgcgtgccccccaacccgatcc

SEQ ID NO: 2887 - DNA, 25 bp, Homo sapiens
tctgcgtgccccccaacccgatcct

SEQ ID NO: 2888 - DNA, 25 bp, Homo sapiens
ctgcgtgccccccaacccgatcctg

SEQ ID NO: 2889 - DNA, 25 bp, Homo sapiens
tgcgtgccccccaacccgatcctgt

SEQ ID NO: 2890 - DNA, 25 bp, Homo sapiens
gcgtgccccccaacccgatcctgta

SEQ ID NO: 2891 - DNA, 25 bp, Homo sapiens
cgtgccccccaacccgatcctgtac

SEQ ID NO: 2892 - DNA, 25 bp, Homo sapiens
gtgccccccaacccgatcctgtacg

SEQ ID NO: 2893 - DNA, 25 bp, Homo sapiens
tgccccccaacccgatcctgtacgc

SEQ ID NO: 2894 - DNA, 25 bp, Homo sapiens
gccccccaacccgatcctgtacgcc

SEQ ID NO: 2895 - DNA, 25 bp, Homo sapiens
ccccccaacccgatcctgtacgcct

SEQ ID NO: 2896 - DNA, 25 bp, Homo sapiens
cccccaacccgatcctgtacgcctg

SEQ ID NO: 2897 - DNA, 25 bp, Homo sapiens
ccccaacccgatcctgtacgcctgg

SEQ ID NO: 2898 - DNA, 25 bp, Homo sapiens
cccaacccgatcctgtacgcctggc

SEQ ID NO: 2899 - DNA, 25 bp, Homo sapiens
ccaacccgatcctgtacgcctggca

SEQ ID NO: 2900 - DNA, 25 bp, Homo sapiens
caacccgatcctgtacgcctggcag

SEQ ID NO: 2901 - DNA, 25 bp, Homo sapiens
aacccgatcctgtacgcctggcagg

SEQ ID NO: 2902 - DNA, 25 bp, Homo sapiens
acccgatcctgtacgcctggcaggt

SEQ ID NO: 2903 - DNA, 25 bp, Homo sapiens
cccgatcctgtacgcctggcaggtg

SEQ ID NO: 2904 - DNA, 25 bp, Homo sapiens
ccgatcctgtacgcctggcaggtga

SEQ ID NO: 2905 - DNA, 25 bp, Homo sapiens
cgatcctgtacgcctggcaggtgaa

SEQ ID NO: 2906 - DNA, 25 bp, Homo sapiens
gatcctgtacgcctggcaggtgaac

SEQ ID NO: 2907 - DNA, 25 bp, Homo sapiens
atcctgtacgcctggcaggtgaaca

SEQ ID NO: 2908 - DNA, 25 bp, Homo sapiens
tcctgtacgcctggcaggtgaacaa

SEQ ID NO: 2909 - DNA, 25 bp, Homo sapiens
cctgtacgcctggcaggtgaacaaa

SEQ ID NO: 2910 - DNA, 25 bp, Homo sapiens
ctgtacgcctggcaggtgaacaaaa

SEQ ID NO: 2911 - DNA, 25 bp, Homo sapiens
tgtacgcctggcaggtgaacaaaac

SEQ ID NO: 2912 - DNA, 25 bp, Homo sapiens
gtacgcctggcaggtgaacaaaacg

SEQ ID NO: 2913 - DNA, 25 bp, Homo sapiens
tacgcctggcaggtgaacaaaacgc

SEQ ID NO: 2914 - DNA, 25 bp, Homo sapiens
acgcctggcaggtgaacaaaacgct

SEQ ID NO: 2915 - DNA, 25 bp, Homo sapiens
cgcctggcaggtgaacaaaacgctc

SEQ ID NO: 2916 - DNA, 25 bp, Homo sapiens
gcctggcaggtgaacaaaacgctca

SEQ ID NO: 2917 - DNA, 25 bp, Homo sapiens
cctggcaggtgaacaaaacgctcaa

SEQ ID NO: 2918 - DNA, 25 bp, Homo sapiens
ctggcaggtgaacaaaacgctcaac

SEQ ID NO: 2919 - DNA, 25 bp, Homo sapiens
tggcaggtgaacaaaacgctcaacc

SEQ ID NO: 2920 - DNA, 25 bp, Homo sapiens
ggcaggtgaacaaaacgctcaacct

SEQ ID NO: 2921 - DNA, 25 bp, Homo sapiens
gcaggtgaacaaaacgctcaacctg

SEQ ID NO: 2922 - DNA, 25 bp, Homo sapiens
caggtgaacaaaacgctcaacctga

SEQ ID NO: 2923 - DNA, 25 bp, Homo sapiens
aggtgaacaaaacgctcaacctgag

SEQ ID NO: 2924 - DNA, 25 bp, Homo sapiens
ggtgaacaaaacgctcaacctgagc

SEQ ID NO: 2925 - DNA, 25 bp, Homo sapiens
gtgaacaaaacgctcaacctgagca

SEQ ID NO: 2926 - DNA, 25 bp, Homo sapiens
tgaacaaaacgctcaacctgagcag

SEQ ID NO: 2927 - DNA, 25 bp, Homo sapiens
gaacaaaacgctcaacctgagcagc

SEQ ID NO: 2928 - DNA, 25 bp, Homo sapiens
aacaaaacgctcaacctgagcagca

SEQ ID NO: 2929 - DNA, 25 bp, Homo sapiens
acaaaacgctcaacctgagcagcat

SEQ ID NO: 2930 - DNA, 25 bp, Homo sapiens
caaaacgctcaacctgagcagcatc

SEQ ID NO: 2931 - DNA, 25 bp, Homo sapiens
aaaacgctcaacctgagcagcatct

SEQ ID NO: 2932 - DNA, 25 bp, Homo sapiens
aaacgctcaacctgagcagcatctc

SEQ ID NO: 2933 - DNA, 25 bp, Homo sapiens
aacgctcaacctgagcagcatctcc

SEQ ID NO: 2934 - DNA, 25 bp, Homo sapiens
acgctcaacctgagcagcatctcct

SEQ ID NO: 2935 - DNA, 25 bp, Homo sapiens
cgctcaacctgagcagcatctcctt

SEQ ID NO: 2936 - DNA, 25 bp, Homo sapiens
gctcaacctgagcagcatctccttc

SEQ ID NO: 2937 - DNA, 25 bp, Homo sapiens
ctcaacctgagcagcatctccttcc

SEQ ID NO: 2938 - DNA, 25 bp, Homo sapiens
tcaacctgagcagcatctccttccc

SEQ ID NO: 2939 - DNA, 25 bp, Homo sapiens
caacctgagcagcatctccttcccc

SEQ ID NO: 2940 - DNA, 25 bp, Homo sapiens
aacctgagcagcatctccttccccg

SEQ ID NO: 2941 - DNA, 25 bp, Homo sapiens
acctgagcagcatctccttccccgc

SEQ ID NO: 2942 - DNA, 25 bp, Homo sapiens
cctgagcagcatctccttccccgcc

SEQ ID NO: 2943 - DNA, 25 bp, Homo sapiens
ctgagcagcatctccttccccgcct

SEQ ID NO: 2944 - DNA, 25 bp, Homo sapiens
tgagcagcatctccttccccgccta

SEQ ID NO: 2945 - DNA, 25 bp, Homo sapiens
gagcagcatctccttccccgcctac

SEQ ID NO: 2946 - DNA, 25 bp, Homo sapiens
agcagcatctccttccccgcctaca

SEQ ID NO: 2947 - DNA, 25 bp, Homo sapiens
gcagcatctccttccccgcctacaa

SEQ ID NO: 2948 - DNA, 25 bp, Homo sapiens
cagcatctccttccccgcctacaac

SEQ ID NO: 2949 - DNA, 25 bp, Homo sapiens
agcatctccttccccgcctacaacc

SEQ ID NO: 2950 - DNA, 25 bp, Homo sapiens
gcatctccttccccgcctacaacca

SEQ ID NO: 2951 - DNA, 25 bp, Homo sapiens
catctccttccccgcctacaaccac

SEQ ID NO: 2952 - DNA, 25 bp, Homo sapiens
atctccttccccgcctacaaccacg

SEQ ID NO: 2953 - DNA, 25 bp, Homo sapiens
tctccttccccgcctacaaccacgg

SEQ ID NO: 2954 - DNA, 25 bp, Homo sapiens
ctccttccccgcctacaaccacggc

SEQ ID NO: 2955 - DNA, 25 bp, Homo sapiens
tccttccccgcctacaaccacggca

SEQ ID NO: 2956 - DNA, 25 bp, Homo sapiens
ccttccccgcctacaaccacggcag

SEQ ID NO: 2957 - DNA, 25 bp, Homo sapiens
cttccccgcctacaaccacggcagg

SEQ ID NO: 2958 - DNA, 25 bp, Homo sapiens
ttccccgcctacaaccacggcaggc

SEQ ID NO: 2959 - DNA, 25 bp, Homo sapiens
tccccgcctacaaccacggcaggca

SEQ ID NO: 2960 - DNA, 25 bp, Homo sapiens
ccccgcctacaaccacggcaggcat

SEQ ID NO: 2961 - DNA, 25 bp, Homo sapiens
cccgcctacaaccacggcaggcatc

SEQ ID NO: 2962 - DNA, 25 bp, Homo sapiens
ccgcctacaaccacggcaggcatcc

SEQ ID NO: 2963 - DNA, 25 bp, Homo sapiens
cgcctacaaccacggcaggcatccc

SEQ ID NO: 2964 - DNA, 25 bp, Homo sapiens
gcctacaaccacggcaggcatcccc

SEQ ID NO: 2965 - DNA, 25 bp, Homo sapiens
cctacaaccacggcaggcatcccct

SEQ ID NO: 2966 - DNA, 25 bp, Homo sapiens
ctacaaccacggcaggcatcccctc

SEQ ID NO: 2967 - DNA, 25 bp, Homo sapiens
tacaaccacggcaggcatcccctct

SEQ ID NO: 2968 - DNA, 25 bp, Homo sapiens
acaaccacggcaggcatcccctcta

SEQ ID NO: 2969 - DNA, 25 bp, Homo sapiens
caaccacggcaggcatcccctctac

SEQ ID NO: 2970 - DNA, 25 bp, Homo sapiens
aaccacggcaggcatcccctctacc

SEQ ID NO: 2971 - DNA, 25 bp, Homo sapiens
accacggcaggcatcccctctacct

SEQ ID NO: 2972 - DNA, 25 bp, Homo sapiens
ccacggcaggcatcccctctacctg

SEQ ID NO: 2973 - DNA, 25 bp, Homo sapiens
cacggcaggcatcccctctacctga

SEQ ID NO: 2974 - DNA, 25 bp, Homo sapiens
acggcaggcatcccctctacctgac

SEQ ID NO: 2975 - DNA, 25 bp, Homo sapiens
cggcaggcatcccctctacctgacc

SEQ ID NO: 2976 - DNA, 25 bp, Homo sapiens
ggcaggcatcccctctacctgaccg

SEQ ID NO: 2977 - DNA, 25 bp, Homo sapiens
gcaggcatcccctctacctgaccgg

SEQ ID NO: 2978 - DNA, 25 bp, Homo sapiens
caggcatcccctctacctgaccggc

SEQ ID NO: 2979 - DNA, 25 bp, Homo sapiens
aggcatcccctctacctgaccggct

SEQ ID NO: 2980 - DNA, 25 bp, Homo sapiens
ggcatcccctctacctgaccggctt

SEQ ID NO: 2981 - DNA, 25 bp, Homo sapiens
gcatcccctctacctgaccggcttc

SEQ ID NO: 2982 - DNA, 25 bp, Homo sapiens
catcccctctacctgaccggcttct

SEQ ID NO: 2983 - DNA, 25 bp, Homo sapiens
atcccctctacctgaccggcttctt

SEQ ID NO: 2984 - DNA, 25 bp, Homo sapiens
tcccctctacctgaccggcttcttc

SEQ ID NO: 2985 - DNA, 25 bp, Homo sapiens
cccctctacctgaccggcttcttcg

SEQ ID NO: 2986 - DNA, 25 bp, Homo sapiens
ccctctacctgaccggcttcttcgg

SEQ ID NO: 2987 - DNA, 25 bp, Homo sapiens
cctctacctgaccggcttcttcgga

SEQ ID NO: 2988 - DNA, 25 bp, Homo sapiens
ctctacctgaccggcttcttcggag

SEQ ID NO: 2989 - DNA, 25 bp, Homo sapiens
tctacctgaccggcttcttcggagg

SEQ ID NO: 2990 - DNA, 25 bp, Homo sapiens
ctacctgaccggcttcttcggagga

SEQ ID NO: 2991 - DNA, 25 bp, Homo sapiens
tacctgaccggcttcttcggaggat

SEQ ID NO: 2992 - DNA, 25 bp, Homo sapiens
acctgaccggcttcttcggaggata

SEQ ID NO: 2993 - DNA, 25 bp, Homo sapiens
cctgaccggcttcttcggaggatac

SEQ ID NO: 2994 - DNA, 25 bp, Homo sapiens
ctgaccggcttcttcggaggataca

SEQ ID NO: 2995 - DNA, 25 bp, Homo sapiens
tgaccggcttcttcggaggatacat

SEQ ID NO: 2996 - DNA, 25 bp, Homo sapiens
gaccggcttcttcggaggatacatc

SEQ ID NO: 2997 - DNA, 25 bp, Homo sapiens
accggcttcttcggaggatacatct

SEQ ID NO: 2998 - DNA, 25 bp, Homo sapiens
ccggcttcttcggaggatacatctt

SEQ ID NO: 2999 - DNA, 25 bp, Homo sapiens
cggcttcttcggaggatacatcttg

SEQ ID NO: 3000 - DNA, 25 bp, Homo sapiens
ggcttcttcggaggatacatcttgg

SEQ ID NO: 3001 - DNA, 25 bp, Homo sapiens
gcttcttcggaggatacatcttggg

SEQ ID NO: 3002 - DNA, 25 bp, Homo sapiens
cttcttcggaggatacatcttgggg

SEQ ID NO: 3003 - DNA, 25 bp, Homo sapiens
ttcttcggaggatacatcttggggg

SEQ ID NO: 3004 - DNA, 25 bp, Homo sapiens
tcttcggaggatacatcttgggggg

SEQ ID NO: 3005 - DNA, 25 bp, Homo sapiens
cttcggaggatacatcttggggggc

SEQ ID NO: 3006 - DNA, 25 bp, Homo sapiens
ttcggaggatacatcttggggggca

SEQ ID NO: 3007 - DNA, 25 bp, Homo sapiens
tcggaggatacatcttggggggcag

SEQ ID NO: 3008 - DNA, 25 bp, Homo sapiens
cggaggatacatcttggggggcagc

SEQ ID NO: 3009 - DNA, 25 bp, Homo sapiens
ggaggatacatcttggggggcagcc

SEQ ID NO: 3010 - DNA, 25 bp, Homo sapiens
gaggatacatcttggggggcagcct

SEQ ID NO: 3011 - DNA, 25 bp, Homo sapiens
aggatacatcttggggggcagccta

SEQ ID NO: 3012 - DNA, 25 bp, Homo sapiens
ggatacatcttggggggcagcctag

SEQ ID NO: 3013 - DNA, 25 bp, Homo sapiens
gatacatcttggggggcagcctagg

SEQ ID NO: 3014 - DNA, 25 bp, Homo sapiens
atacatcttggggggcagcctagga

SEQ ID NO: 3015 - DNA, 25 bp, Homo sapiens
tacatcttggggggcagcctaggaa

SEQ ID NO: 3016 - DNA, 25 bp, Homo sapiens
acatcttggggggcagcctaggaat

SEQ ID NO: 3017 - DNA, 25 bp, Homo sapiens
catcttggggggcagcctaggaatg

SEQ ID NO: 3018 - DNA, 25 bp, Homo sapiens
atcttggggggcagcctaggaatgg

SEQ ID NO: 3019 - DNA, 25 bp, Homo sapiens
tcttggggggcagcctaggaatggg

SEQ ID NO: 3020 - DNA, 25 bp, Homo sapiens
cttggggggcagcctaggaatgggc

SEQ ID NO: 3021 - DNA, 25 bp, Homo sapiens
ttggggggcagcctaggaatgggcc

SEQ ID NO: 3022 - DNA, 25 bp, Homo sapiens
tggggggcagcctaggaatgggcca

SEQ ID NO: 3023 - DNA, 25 bp, Homo sapiens
ggggggcagcctaggaatgggccag

SEQ ID NO: 3024 - DNA, 25 bp, Homo sapiens
gggggcagcctaggaatgggccagt

SEQ ID NO: 3025 - DNA, 25 bp, Homo sapiens
ggggcagcctaggaatgggccagtt

SEQ ID NO: 3026 - DNA, 25 bp, Homo sapiens
gggcagcctaggaatgggccagtta

SEQ ID NO: 3027 - DNA, 25 bp, Homo sapiens
ggcagcctaggaatgggccagttac

SEQ ID NO: 3028 - DNA, 25 bp, Homo sapiens
gcagcctaggaatgggccagttact

SEQ ID NO: 3029 - DNA, 25 bp, Homo sapiens
cagcctaggaatgggccagttactc

SEQ ID NO: 3030 - DNA, 25 bp, Homo sapiens
agcctaggaatgggccagttactcc

SEQ ID NO: 3031 - DNA, 25 bp, Homo sapiens
gcctaggaatgggccagttactcct

SEQ ID NO: 3032 - DNA, 25 bp, Homo sapiens
cctaggaatgggccagttactcctg

SEQ ID NO: 3033 - DNA, 25 bp, Homo sapiens
ctaggaatgggccagttactcctgc

SEQ ID NO: 3034 - DNA, 25 bp, Homo sapiens
taggaatgggccagttactcctgcg

SEQ ID NO: 3035 - DNA, 25 bp, Homo sapiens
aggaatgggccagttactcctgcgg

SEQ ID NO: 3036 - DNA, 25 bp, Homo sapiens
ggaatgggccagttactcctgcggg

SEQ ID NO: 3037 - DNA, 25 bp, Homo sapiens
gaatgggccagttactcctgcgggc

SEQ ID NO: 3038 - DNA, 25 bp, Homo sapiens
aatgggccagttactcctgcgggcc

SEQ ID NO: 3039 - DNA, 25 bp, Homo sapiens
atgggccagttactcctgcgggcca

SEQ ID NO: 3040 - DNA, 25 bp, Homo sapiens
tgggccagttactcctgcgggccaa

SEQ ID NO: 3041 - DNA, 25 bp, Homo sapiens
gggccagttactcctgcgggccaaa

SEQ ID NO: 3042 - DNA, 25 bp, Homo sapiens
ggccagttactcctgcgggccaaag

SEQ ID NO: 3043 - DNA, 25 bp, Homo sapiens
gccagttactcctgcgggccaaagc

SEQ ID NO: 3044 - DNA, 25 bp, Homo sapiens
ccagttactcctgcgggccaaagcc

SEQ ID NO: 3045 - DNA, 25 bp, Homo sapiens
cagttactcctgcgggccaaagcca

SEQ ID NO: 3046 - DNA, 25 bp, Homo sapiens
agttactcctgcgggccaaagccat

SEQ ID NO: 3047 - DNA, 25 bp, Homo sapiens
gttactcctgcgggccaaagccatg

SEQ ID NO: 3048 - DNA, 25 bp, Homo sapiens
ttactcctgcgggccaaagccatgc

SEQ ID NO: 3049 - DNA, 25 bp, Homo sapiens
tactcctgcgggccaaagccatgcg

SEQ ID NO: 3050 - DNA, 25 bp, Homo sapiens
actcctgcgggccaaagccatgcgg

SEQ ID NO: 3051 - DNA, 25 bp, Homo sapiens
ctcctgcgggccaaagccatgcggc

SEQ ID NO: 3052 - DNA, 25 bp, Homo sapiens
tcctgcgggccaaagccatgcggct

SEQ ID NO: 3053 - DNA, 25 bp, Homo sapiens
cctgcgggccaaagccatgcggctg

SEQ ID NO: 3054 - DNA, 25 bp, Homo sapiens
ctgcgggccaaagccatgcggctgc

SEQ ID NO: 3055 - DNA, 25 bp, Homo sapiens
tgcgggccaaagccatgcggctgct

SEQ ID NO: 3056 - DNA, 25 bp, Homo sapiens
gcgggccaaagccatgcggctgctg

SEQ ID NO: 3057 - DNA, 25 bp, Homo sapiens
cgggccaaagccatgcggctgctgt

SEQ ID NO: 3058 - DNA, 25 bp, Homo sapiens
gggccaaagccatgcggctgctgta

SEQ ID NO: 3059 - DNA, 25 bp, Homo sapiens
ggccaaagccatgcggctgctgtac

SEQ ID NO: 3060 - DNA, 25 bp, Homo sapiens
gccaaagccatgcggctgctgtact

SEQ ID NO: 3061 - DNA, 25 bp, Homo sapiens
ccaaagccatgcggctgctgtacta

SEQ ID NO: 3062 - DNA, 25 bp, Homo sapiens
caaagccatgcggctgctgtactac

SEQ ID NO: 3063 - DNA, 25 bp, Homo sapiens
aaagccatgcggctgctgtactacc

SEQ ID NO: 3064 - DNA, 25 bp, Homo sapiens
aagccatgcggctgctgtactacct

SEQ ID NO: 3065 - DNA, 25 bp, Homo sapiens
agccatgcggctgctgtactacctg

SEQ ID NO: 3066 - DNA, 25 bp, Homo sapiens
gccatgcggctgctgtactacctga

SEQ ID NO: 3067 - DNA, 25 bp, Homo sapiens
ccatgcggctgctgtactacctgaa

SEQ ID NO: 3068 - DNA, 25 bp, Homo sapiens
catgcggctgctgtactacctgaag

SEQ ID NO: 3069 - DNA, 25 bp, Homo sapiens
atgcggctgctgtactacctgaaga

SEQ ID NO: 3070 - DNA, 25 bp, Homo sapiens
tgcggctgctgtactacctgaagac

SEQ ID NO: 3071 - DNA, 25 bp, Homo sapiens
gcggctgctgtactacctgaagacc

SEQ ID NO: 3072 - DNA, 25 bp, Homo sapiens
cggctgctgtactacctgaagaccg

SEQ ID NO: 3073 - DNA, 25 bp, Homo sapiens
ggctgctgtactacctgaagaccga

SEQ ID NO: 3074 - DNA, 25 bp, Homo sapiens
gctgctgtactacctgaagaccgag

SEQ ID NO: 3075 - DNA, 25 bp, Homo sapiens
ctgctgtactacctgaagaccgagg

SEQ ID NO: 3076 - DNA, 25 bp, Homo sapiens
tgctgtactacctgaagaccgagga

SEQ ID NO: 3077 - DNA, 25 bp, Homo sapiens
gctgtactacctgaagaccgaggac

SEQ ID NO: 3078 - DNA, 25 bp, Homo sapiens
ctgtactacctgaagaccgaggacc

SEQ ID NO: 3079 - DNA, 25 bp, Homo sapiens
tgtactacctgaagaccgaggaccc

SEQ ID NO: 3080 - DNA, 25 bp, Homo sapiens
gtactacctgaagaccgaggaccct

SEQ ID NO: 3081 - DNA, 25 bp, Homo sapiens
tactacctgaagaccgaggaccctg

SEQ ID NO: 3082 - DNA, 25 bp, Homo sapiens
actacctgaagaccgaggaccctga

SEQ ID NO: 3083 - DNA, 25 bp, Homo sapiens
ctacctgaagaccgaggaccctgag

SEQ ID NO: 3084 - DNA, 25 bp, Homo sapiens
tacctgaagaccgaggaccctgagt

SEQ ID NO: 3085 - DNA, 25 bp, Homo sapiens
acctgaagaccgaggaccctgagta

SEQ ID NO: 3086 - DNA, 25 bp, Homo sapiens
cctgaagaccgaggaccctgagtac

SEQ ID NO: 3087 - DNA, 25 bp, Homo sapiens
ctgaagaccgaggaccctgagtacg

SEQ ID NO: 3088 - DNA, 25 bp, Homo sapiens
tgaagaccgaggaccctgagtacga

SEQ ID NO: 3089 - DNA, 25 bp, Homo sapiens
gaagaccgaggaccctgagtacgac

SEQ ID NO: 3090 - DNA, 25 bp, Homo sapiens
aagaccgaggaccctgagtacgacg

SEQ ID NO: 3091 - DNA, 25 bp, Homo sapiens
agaccgaggaccctgagtacgacgt

SEQ ID NO: 3092 - DNA, 25 bp, Homo sapiens
gaccgaggaccctgagtacgacgtg

SEQ ID NO: 3093 - DNA, 25 bp, Homo sapiens
accgaggaccctgagtacgacgtgc

SEQ ID NO: 3094 - DNA, 25 bp, Homo sapiens
ccgaggaccctgagtacgacgtgca

SEQ ID NO: 3095 - DNA, 25 bp, Homo sapiens
cgaggaccctgagtacgacgtgcag

SEQ ID NO: 3096 - DNA, 25 bp, Homo sapiens
gaggaccctgagtacgacgtgcaga

SEQ ID NO: 3097 - DNA, 25 bp, Homo sapiens
aggaccctgagtacgacgtgcagag

SEQ ID NO: 3098 - DNA, 25 bp, Homo sapiens
ggaccctgagtacgacgtgcagagc

SEQ ID NO: 3099 - DNA, 25 bp, Homo sapiens
gaccctgagtacgacgtgcagagca

SEQ ID NO: 3100 - DNA, 25 bp, Homo sapiens
accctgagtacgacgtgcagagcaa

SEQ ID NO: 3101 - DNA, 25 bp, Homo sapiens
ccctgagtacgacgtgcagagcaag

SEQ ID NO: 3102 - DNA, 25 bp, Homo sapiens
cctgagtacgacgtgcagagcaagc

SEQ ID NO: 3103 - DNA, 25 bp, Homo sapiens
ctgagtacgacgtgcagagcaagca

SEQ ID NO: 3104 - DNA, 25 bp, Homo sapiens
tgagtacgacgtgcagagcaagcag

SEQ ID NO: 3105 - DNA, 25 bp, Homo sapiens
gagtacgacgtgcagagcaagcagt

SEQ ID NO: 3106 - DNA, 25 bp, Homo sapiens
agtacgacgtgcagagcaagcagtg

SEQ ID NO: 3107 - DNA, 25 bp, Homo sapiens
gtacgacgtgcagagcaagcagtgg

SEQ ID NO: 3108 - DNA, 25 bp, Homo sapiens
tacgacgtgcagagcaagcagtggc

SEQ ID NO: 3109 - DNA, 25 bp, Homo sapiens
acgacgtgcagagcaagcagtggct

SEQ ID NO: 3110 - DNA, 25 bp, Homo sapiens
cgacgtgcagagcaagcagtggctc

SEQ ID NO: 3111 - DNA, 25 bp, Homo sapiens
gacgtgcagagcaagcagtggctca

SEQ ID NO: 3112 - DNA, 25 bp, Homo sapiens
acgtgcagagcaagcagtggctcac

SEQ ID NO: 3113 - DNA, 25 bp, Homo sapiens
cgtgcagagcaagcagtggctcacc

SEQ ID NO: 3114 - DNA, 25 bp, Homo sapiens
gtgcagagcaagcagtggctcaccc

SEQ ID NO: 3115 - DNA, 25 bp, Homo sapiens
tgcagagcaagcagtggctcaccca

SEQ ID NO: 3116 - DNA, 25 bp, Homo sapiens
gcagagcaagcagtggctcacccat

SEQ ID NO: 3117 - DNA, 25 bp, Homo sapiens
cagagcaagcagtggctcacccatt

SEQ ID NO: 3118 - DNA, 25 bp, Homo sapiens
agagcaagcagtggctcacccattt

SEQ ID NO: 3119 - DNA, 25 bp, Homo sapiens
gagcaagcagtggctcacccatttg

SEQ ID NO: 3120 - DNA, 25 bp, Homo sapiens
agcaagcagtggctcacccatttgc

SEQ ID NO: 3121 - DNA, 25 bp, Homo sapiens
gcaagcagtggctcacccatttgct

SEQ ID NO: 3122 - DNA, 25 bp, Homo sapiens
caagcagtggctcacccatttgctc

SEQ ID NO: 3123 - DNA, 25 bp, Homo sapiens
aagcagtggctcacccatttgctcg

SEQ ID NO: 3124 - DNA, 25 bp, Homo sapiens
agcagtggctcacccatttgctcga

SEQ ID NO: 3125 - DNA, 25 bp, Homo sapiens
gcagtggctcacccatttgctcgat

SEQ ID NO: 3126 - DNA, 25 bp, Homo sapiens
cagtggctcacccatttgctcgatc

SEQ ID NO: 3127 - DNA, 25 bp, Homo sapiens
agtggctcacccatttgctcgatca

SEQ ID NO: 3128 - DNA, 25 bp, Homo sapiens
gtggctcacccatttgctcgatcaa

SEQ ID NO: 3129 - DNA, 25 bp, Homo sapiens
tggctcacccatttgctcgatcaat

SEQ ID NO: 3130 - DNA, 25 bp, Homo sapiens
ggctcacccatttgctcgatcaatt

SEQ ID NO: 3131 - DNA, 25 bp, Homo sapiens
gctcacccatttgctcgatcaattt

SEQ ID NO: 3132 - DNA, 25 bp, Homo sapiens
ctcacccatttgctcgatcaattta

SEQ ID NO: 3133 - DNA, 25 bp, Homo sapiens
tcacccatttgctcgatcaatttac

SEQ ID NO: 3134 - DNA, 25 bp, Homo sapiens
cacccatttgctcgatcaatttacc

SEQ ID NO: 3135 - DNA, 25 bp, Homo sapiens
acccatttgctcgatcaatttacca

SEQ ID NO: 3136 - DNA, 25 bp, Homo sapiens
cccatttgctcgatcaatttaccaa

SEQ ID NO: 3137 - DNA, 25 bp, Homo sapiens
ccatttgctcgatcaatttaccaac

SEQ ID NO: 3138 - DNA, 25 bp, Homo sapiens
catttgctcgatcaatttaccaaca

SEQ ID NO: 3139 - DNA, 25 bp, Homo sapiens
atttgctcgatcaatttaccaacat

SEQ ID NO: 3140 - DNA, 25 bp, Homo sapiens
tttgctcgatcaatttaccaacatt

SEQ ID NO: 3141 - DNA, 25 bp, Homo sapiens
ttgctcgatcaatttaccaacatta

SEQ ID NO: 3142 - DNA, 25 bp, Homo sapiens
tgctcgatcaatttaccaacattaa

SEQ ID NO: 3143 - DNA, 25 bp, Homo sapiens
gctcgatcaatttaccaacattaag

SEQ ID NO: 3144 - DNA, 25 bp, Homo sapiens
ctcgatcaatttaccaacattaaga

SEQ ID NO: 3145 - DNA, 25 bp, Homo sapiens
tcgatcaatttaccaacattaagaa

SEQ ID NO: 3146 - DNA, 25 bp, Homo sapiens
cgatcaatttaccaacattaagaac

SEQ ID NO: 3147 - DNA, 25 bp, Homo sapiens
gatcaatttaccaacattaagaaca

SEQ ID NO: 3148 - DNA, 25 bp, Homo sapiens
atcaatttaccaacattaagaacat

SEQ ID NO: 3149 - DNA, 25 bp, Homo sapiens
tcaatttaccaacattaagaacatc

SEQ ID NO: 3150 - DNA, 25 bp, Homo sapiens
caatttaccaacattaagaacatct

SEQ ID NO: 3151 - DNA, 25 bp, Homo sapiens
aatttaccaacattaagaacatctt

SEQ ID NO: 3152 - DNA, 25 bp, Homo sapiens
atttaccaacattaagaacatcttg

SEQ ID NO: 3153 - DNA, 25 bp, Homo sapiens
tttaccaacattaagaacatcttgg

SEQ ID NO: 3154 - DNA, 25 bp, Homo sapiens
ttaccaacattaagaacatcttggc

SEQ ID NO: 3155 - DNA, 25 bp, Homo sapiens
taccaacattaagaacatcttggcc

SEQ ID NO: 3156 - DNA, 25 bp, Homo sapiens
accaacattaagaacatcttggcct

SEQ ID NO: 3157 - DNA, 25 bp, Homo sapiens
ccaacattaagaacatcttggcctt

SEQ ID NO: 3158 - DNA, 25 bp, Homo sapiens
caacattaagaacatcttggccttg

SEQ ID NO: 3159 - DNA, 25 bp, Homo sapiens
aacattaagaacatcttggccttga

SEQ ID NO: 3160 - DNA, 25 bp, Homo sapiens
acattaagaacatcttggccttgaa

SEQ ID NO: 3161 - DNA, 25 bp, Homo sapiens
cattaagaacatcttggccttgaaa

SEQ ID NO: 3162 - DNA, 25 bp, Homo sapiens
attaagaacatcttggccttgaaaa

SEQ ID NO: 3163 - DNA, 25 bp, Homo sapiens
ttaagaacatcttggccttgaaaaa

SEQ ID NO: 3164 - DNA, 25 bp, Homo sapiens
taagaacatcttggccttgaaaaaa

SEQ ID NO: 3165 - DNA, 25 bp, Homo sapiens
aagaacatcttggccttgaaaaaaa

SEQ ID NO: 3166 - DNA, 25 bp, Homo sapiens
agaacatcttggccttgaaaaaaat

SEQ ID NO: 3167 - DNA, 25 bp, Homo sapiens
gaacatcttggccttgaaaaaaatt

SEQ ID NO: 3168 - DNA, 25 bp, Homo sapiens
aacatcttggccttgaaaaaaattg

SEQ ID NO: 3169 - DNA, 25 bp, Homo sapiens
acatcttggccttgaaaaaaattga

SEQ ID NO: 3170 - DNA, 25 bp, Homo sapiens
catcttggccttgaaaaaaattgag

SEQ ID NO: 3171 - DNA, 25 bp, Homo sapiens
atcttggccttgaaaaaaattgagg

SEQ ID NO: 3172 - DNA, 25 bp, Homo sapiens
tcttggccttgaaaaaaattgaggt

SEQ ID NO: 3173 - DNA, 25 bp, Homo sapiens
cttggccttgaaaaaaattgaggta

SEQ ID NO: 3174 - DNA, 25 bp, Homo sapiens
ttggccttgaaaaaaattgaggtag

SEQ ID NO: 3175 - DNA, 25 bp, Homo sapiens
tggccttgaaaaaaattgaggtagt

SEQ ID NO: 3176 - DNA, 25 bp, Homo sapiens
ggccttgaaaaaaattgaggtagtc

SEQ ID NO: 3177 - DNA, 25 bp, Homo sapiens
gccttgaaaaaaattgaggtagtcc

SEQ ID NO: 3178 - DNA, 25 bp, Homo sapiens
ccttgaaaaaaattgaggtagtcca

SEQ ID NO: 3179 - DNA, 25 bp, Homo sapiens
cttgaaaaaaattgaggtagtccac

SEQ ID NO: 3180 - DNA, 25 bp, Homo sapiens
ttgaaaaaaattgaggtagtccact

SEQ ID NO: 3181 - DNA, 25 bp, Homo sapiens
tgaaaaaaattgaggtagtccactt

SEQ ID NO: 3182 - DNA, 25 bp, Homo sapiens
gaaaaaaattgaggtagtccacttt

SEQ ID NO: 3183 - DNA, 25 bp, Homo sapiens
aaaaaaattgaggtagtccacttta

SEQ ID NO: 3184 - DNA, 25 bp, Homo sapiens
aaaaaattgaggtagtccactttac

SEQ ID NO: 3185 - DNA, 25 bp, Homo sapiens
aaaaattgaggtagtccactttaca

SEQ ID NO: 3186 - DNA, 25 bp, Homo sapiens
aaaattgaggtagtccactttacat

SEQ ID NO: 3187 - DNA, 25 bp, Homo sapiens
aaattgaggtagtccactttacatc

SEQ ID NO: 3188 - DNA, 25 bp, Homo sapiens
aattgaggtagtccactttacatcg

SEQ ID NO: 3189 - DNA, 25 bp, Homo sapiens
attgaggtagtccactttacatcgc

SEQ ID NO: 3190 - DNA, 25 bp, Homo sapiens
ttgaggtagtccactttacatcgct

SEQ ID NO: 3191 - DNA, 25 bp, Homo sapiens
tgaggtagtccactttacatcgctt

SEQ ID NO: 3192 - DNA, 25 bp, Homo sapiens
gaggtagtccactttacatcgcttt

SEQ ID NO: 3193 - DNA, 25 bp, Homo sapiens
aggtagtccactttacatcgctttc

SEQ ID NO: 3194 - DNA, 25 bp, Homo sapiens
ggtagtccactttacatcgctttcc

SEQ ID NO: 3195 - DNA, 25 bp, Homo sapiens
gtagtccactttacatcgctttcca

SEQ ID NO: 3196 - DNA, 25 bp, Homo sapiens
tagtccactttacatcgctttccag

SEQ ID NO: 3197 - DNA, 25 bp, Homo sapiens
agtccactttacatcgctttccaga

SEQ ID NO: 3198 - DNA, 25 bp, Homo sapiens
gtccactttacatcgctttccagac

SEQ ID NO: 3199 - DNA, 25 bp, Homo sapiens
tccactttacatcgctttccagaca

SEQ ID NO: 3200 - DNA, 25 bp, Homo sapiens
ccactttacatcgctttccagacaa

SEQ ID NO: 3201 - DNA, 25 bp, Homo sapiens
cactttacatcgctttccagacaac

SEQ ID NO: 3202 - DNA, 25 bp, Homo sapiens
actttacatcgctttccagacaact

SEQ ID NO: 3203 - DNA, 25 bp, Homo sapiens
ctttacatcgctttccagacaactg

SEQ ID NO: 3204 - DNA, 25 bp, Homo sapiens
tttacatcgctttccagacaactgg

SEQ ID NO: 3205 - DNA, 25 bp, Homo sapiens
ttacatcgctttccagacaactgga

SEQ ID NO: 3206 - DNA, 25 bp, Homo sapiens
tacatcgctttccagacaactggaa

SEQ ID NO: 3207 - DNA, 25 bp, Homo sapiens
acatcgctttccagacaactggaat

SEQ ID NO: 3208 - DNA, 25 bp, Homo sapiens
catcgctttccagacaactggaatt

SEQ ID NO: 3209 - DNA, 25 bp, Homo sapiens
atcgctttccagacaactggaattt

SEQ ID NO: 3210 - DNA, 25 bp, Homo sapiens
tcgctttccagacaactggaatttg

SEQ ID NO: 3211 - DNA, 25 bp, Homo sapiens
cgctttccagacaactggaatttga

SEQ ID NO: 3212 - DNA, 25 bp, Homo sapiens
gctttccagacaactggaatttgag

SEQ ID NO: 3213 - DNA, 25 bp, Homo sapiens
ctttccagacaactggaatttgagg

SEQ ID NO: 3214 - DNA, 25 bp, Homo sapiens
tttccagacaactggaatttgaggc

SEQ ID NO: 3215 - DNA, 25 bp, Homo sapiens
ttccagacaactggaatttgaggca

SEQ ID NO: 3216 - DNA, 25 bp, Homo sapiens
tccagacaactggaatttgaggcaa

SEQ ID NO: 3217 - DNA, 25 bp, Homo sapiens
ccagacaactggaatttgaggcaac

SEQ ID NO: 3218 - DNA, 25 bp, Homo sapiens
cagacaactggaatttgaggcaact

SEQ ID NO: 3219 - DNA, 25 bp, Homo sapiens
agacaactggaatttgaggcaactt

SEQ ID NO: 3220 - DNA, 25 bp, Homo sapiens
gacaactggaatttgaggcaacttc

SEQ ID NO: 3221 - DNA, 25 bp, Homo sapiens
acaactggaatttgaggcaacttct

SEQ ID NO: 3222 - DNA, 25 bp, Homo sapiens
caactggaatttgaggcaacttctg

SEQ ID NO: 3223 - DNA, 25 bp, Homo sapiens
aactggaatttgaggcaacttctgt

SEQ ID NO: 3224 - DNA, 25 bp, Homo sapiens
actggaatttgaggcaacttctgtg

SEQ ID NO: 3225 - DNA, 25 bp, Homo sapiens
ctggaatttgaggcaacttctgtga

SEQ ID NO: 3226 - DNA, 25 bp, Homo sapiens
tggaatttgaggcaacttctgtgac

SEQ ID NO: 3227 - DNA, 25 bp, Homo sapiens
ggaatttgaggcaacttctgtgact

SEQ ID NO: 3228 - DNA, 25 bp, Homo sapiens
gaatttgaggcaacttctgtgactg

SEQ ID NO: 3229 - DNA, 25 bp, Homo sapiens
aatttgaggcaacttctgtgactgt

SEQ ID NO: 3230 - DNA, 25 bp, Homo sapiens
atttgaggcaacttctgtgactgtg

SEQ ID NO: 3231 - DNA, 25 bp, Homo sapiens
tttgaggcaacttctgtgactgtga

SEQ ID NO: 3232 - DNA, 25 bp, Homo sapiens
ttgaggcaacttctgtgactgtgat

SEQ ID NO: 3233 - DNA, 25 bp, Homo sapiens
tgaggcaacttctgtgactgtgatc

SEQ ID NO: 3234 - DNA, 25 bp, Homo sapiens
gaggcaacttctgtgactgtgatcc

SEQ ID NO: 3235 - DNA, 25 bp, Homo sapiens
aggcaacttctgtgactgtgatccc

SEQ ID NO: 3236 - DNA, 25 bp, Homo sapiens
ggcaacttctgtgactgtgatccct

SEQ ID NO: 3237 - DNA, 25 bp, Homo sapiens
gcaacttctgtgactgtgatccctg

SEQ ID NO: 3238 - DNA, 25 bp, Homo sapiens
caacttctgtgactgtgatccctgt

SEQ ID NO: 3239 - DNA, 25 bp, Homo sapiens
aacttctgtgactgtgatccctgtg

SEQ ID NO: 3240 - DNA, 25 bp, Homo sapiens
acttctgtgactgtgatccctgtgt

SEQ ID NO: 3241 - DNA, 25 bp, Homo sapiens
cttctgtgactgtgatccctgtgtt

SEQ ID NO: 3242 - DNA, 25 bp, Homo sapiens
ttctgtgactgtgatccctgtgttt

SEQ ID NO: 3243 - DNA, 25 bp, Homo sapiens
tctgtgactgtgatccctgtgtttc

SEQ ID NO: 3244 - DNA, 25 bp, Homo sapiens
ctgtgactgtgatccctgtgtttca

SEQ ID NO: 3245 - DNA, 25 bp, Homo sapiens
tgtgactgtgatccctgtgtttcac

SEQ ID NO: 3246 - DNA, 25 bp, Homo sapiens
gtgactgtgatccctgtgtttcacc

SEQ ID NO: 3247 - DNA, 25 bp, Homo sapiens
tgactgtgatccctgtgtttcacct

SEQ ID NO: 3248 - DNA, 25 bp, Homo sapiens
gactgtgatccctgtgtttcacctg

SEQ ID NO: 3249 - DNA, 25 bp, Homo sapiens
actgtgatccctgtgtttcacctgg

SEQ ID NO: 3250 - DNA, 25 bp, Homo sapiens
ctgtgatccctgtgtttcacctggc

SEQ ID NO: 3251 - DNA, 25 bp, Homo sapiens
tgtgatccctgtgtttcacctggca

SEQ ID NO: 3252 - DNA, 25 bp, Homo sapiens
gtgatccctgtgtttcacctggcat

SEQ ID NO: 3253 - DNA, 25 bp, Homo sapiens
tgatccctgtgtttcacctggcata

SEQ ID NO: 3254 - DNA, 25 bp, Homo sapiens
gatccctgtgtttcacctggcatac

SEQ ID NO: 3255 - DNA, 25 bp, Homo sapiens
atccctgtgtttcacctggcataca

SEQ ID NO: 3256 - DNA, 25 bp, Homo sapiens
tccctgtgtttcacctggcatacat

SEQ ID NO: 3257 - DNA, 25 bp, Homo sapiens
ccctgtgtttcacctggcatacatt

SEQ ID NO: 3258 - DNA, 25 bp, Homo sapiens
cctgtgtttcacctggcatacattc

SEQ ID NO: 3259 - DNA, 25 bp, Homo sapiens
ctgtgtttcacctggcatacattct

SEQ ID NO: 3260 - DNA, 25 bp, Homo sapiens
tgtgtttcacctggcatacattctc

SEQ ID NO: 3261 - DNA, 25 bp, Homo sapiens
gtgtttcacctggcatacattctca

SEQ ID NO: 3262 - DNA, 25 bp, Homo sapiens
tgtttcacctggcatacattctcat

SEQ ID NO: 3263 - DNA, 25 bp, Homo sapiens
gtttcacctggcatacattctcatc

SEQ ID NO: 3264 - DNA, 25 bp, Homo sapiens
tttcacctggcatacattctcatca

SEQ ID NO: 3265 - DNA, 25 bp, Homo sapiens
ttcacctggcatacattctcatcat

SEQ ID NO: 3266 - DNA, 25 bp, Homo sapiens
tcacctggcatacattctcatcatt

SEQ ID NO: 3267 - DNA, 25 bp, Homo sapiens
cacctggcatacattctcatcattc

SEQ ID NO: 3268 - DNA, 25 bp, Homo sapiens
acctggcatacattctcatcattct

SEQ ID NO: 3269 - DNA, 25 bp, Homo sapiens
cctggcatacattctcatcattctg

SEQ ID NO: 3270 - DNA, 25 bp, Homo sapiens
ctggcatacattctcatcattctgt

SEQ ID NO: 3271 - DNA, 25 bp, Homo sapiens
tggcatacattctcatcattctgtt

SEQ ID NO: 3272 - DNA, 25 bp, Homo sapiens
ggcatacattctcatcattctgttt

SEQ ID NO: 3273 - DNA, 25 bp, Homo sapiens
gcatacattctcatcattctgtttg

SEQ ID NO: 3274 - DNA, 25 bp, Homo sapiens
catacattctcatcattctgtttgc

SEQ ID NO: 3275 - DNA, 25 bp, Homo sapiens
atacattctcatcattctgtttgca

SEQ ID NO: 3276 - DNA, 25 bp, Homo sapiens
tacattctcatcattctgtttgcag

SEQ ID NO: 3277 - DNA, 25 bp, Homo sapiens
acattctcatcattctgtttgcagt

SEQ ID NO: 3278 - DNA, 25 bp, Homo sapiens
cattctcatcattctgtttgcagtc

SEQ ID NO: 3279 - DNA, 25 bp, Homo sapiens
attctcatcattctgtttgcagtca

SEQ ID NO: 3280 - DNA, 25 bp, Homo sapiens
ttctcatcattctgtttgcagtcac

SEQ ID NO: 3281 - DNA, 25 bp, Homo sapiens
tctcatcattctgtttgcagtcaca

SEQ ID NO: 3282 - DNA, 25 bp, Homo sapiens
ctcatcattctgtttgcagtcacat

SEQ ID NO: 3283 - DNA, 25 bp, Homo sapiens
tcatcattctgtttgcagtcacatc

SEQ ID NO: 3284 - DNA, 25 bp, Homo sapiens
catcattctgtttgcagtcacatca

SEQ ID NO: 3285 - DNA, 25 bp, Homo sapiens
atcattctgtttgcagtcacatcat

SEQ ID NO: 3286 - DNA, 25 bp, Homo sapiens
tcattctgtttgcagtcacatcatg

SEQ ID NO: 3287 - DNA, 25 bp, Homo sapiens
cattctgtttgcagtcacatcatgc

SEQ ID NO: 3288 - DNA, 25 bp, Homo sapiens
attctgtttgcagtcacatcatgct

SEQ ID NO: 3289 - DNA, 25 bp, Homo sapiens
ttctgtttgcagtcacatcatgctt

SEQ ID NO: 3290 - DNA, 25 bp, Homo sapiens
tctgtttgcagtcacatcatgcttt

SEQ ID NO: 3291 - DNA, 25 bp, Homo sapiens
ctgtttgcagtcacatcatgcttta

SEQ ID NO: 3292 - DNA, 25 bp, Homo sapiens
tgtttgcagtcacatcatgctttag

SEQ ID NO: 3293 - DNA, 25 bp, Homo sapiens
gtttgcagtcacatcatgctttagg

SEQ ID NO: 3294 - DNA, 25 bp, Homo sapiens
tttgcagtcacatcatgctttaggt

SEQ ID NO: 3295 - DNA, 25 bp, Homo sapiens
ttgcagtcacatcatgctttaggtt

SEQ ID NO: 3296 - DNA, 25 bp, Homo sapiens
tgcagtcacatcatgctttaggttt

SEQ ID NO: 3297 - DNA, 25 bp, Homo sapiens
gcagtcacatcatgctttaggtttg

SEQ ID NO: 3298 - DNA, 25 bp, Homo sapiens
cagtcacatcatgctttaggtttga

SEQ ID NO: 3299 - DNA, 25 bp, Homo sapiens
agtcacatcatgctttaggtttgac

SEQ ID NO: 3300 - DNA, 25 bp, Homo sapiens
gtcacatcatgctttaggtttgact

SEQ ID NO: 3301 - DNA, 25 bp, Homo sapiens
tcacatcatgctttaggtttgactg

SEQ ID NO: 3302 - DNA, 25 bp, Homo sapiens
cacatcatgctttaggtttgactgc

SEQ ID NO: 3303 - DNA, 25 bp, Homo sapiens
acatcatgctttaggtttgactgca

SEQ ID NO: 3304 - DNA, 25 bp, Homo sapiens
catcatgctttaggtttgactgcat

SEQ ID NO: 3305 - DNA, 25 bp, Homo sapiens
atcatgctttaggtttgactgcata

SEQ ID NO: 3306 - DNA, 25 bp, Homo sapiens
tcatgctttaggtttgactgcatac

SEQ ID NO: 3307 - DNA, 25 bp, Homo sapiens
catgctttaggtttgactgcatacg

SEQ ID NO: 3308 - DNA, 25 bp, Homo sapiens
atgctttaggtttgactgcatacga

SEQ ID NO: 3309 - DNA, 25 bp, Homo sapiens
tgctttaggtttgactgcatacgaa

SEQ ID NO: 3310 - DNA, 25 bp, Homo sapiens
gctttaggtttgactgcatacgaaa

SEQ ID NO: 3311 - DNA, 25 bp, Homo sapiens
ctttaggtttgactgcatacgaaac

SEQ ID NO: 3312 - DNA, 25 bp, Homo sapiens
tttaggtttgactgcatacgaaaca

SEQ ID NO: 3313 - DNA, 25 bp, Homo sapiens
ttaggtttgactgcatacgaaacaa

SEQ ID NO: 3314 - DNA, 25 bp, Homo sapiens
taggtttgactgcatacgaaacaaa

SEQ ID NO: 3315 - DNA, 25 bp, Homo sapiens
aggtttgactgcatacgaaacaaaa

SEQ ID NO: 3316 - DNA, 25 bp, Homo sapiens
ggtttgactgcatacgaaacaaaat

SEQ ID NO: 3317 - DNA, 25 bp, Homo sapiens
gtttgactgcatacgaaacaaaatg

SEQ ID NO: 3318 - DNA, 25 bp, Homo sapiens
tttgactgcatacgaaacaaaatgt

SEQ ID NO: 3319 - DNA, 25 bp, Homo sapiens
ttgactgcatacgaaacaaaatgtg

SEQ ID NO: 3320 - DNA, 25 bp, Homo sapiens
tgactgcatacgaaacaaaatgtgt

SEQ ID NO: 3321 - DNA, 25 bp, Homo sapiens
gactgcatacgaaacaaaatgtgtg

SEQ ID NO: 3322 - DNA, 25 bp, Homo sapiens
actgcatacgaaacaaaatgtgtgt

SEQ ID NO: 3323 - DNA, 25 bp, Homo sapiens
ctgcatacgaaacaaaatgtgtgtt

SEQ ID NO: 3324 - DNA, 25 bp, Homo sapiens
tgcatacgaaacaaaatgtgtgttg

SEQ ID NO: 3325 - DNA, 25 bp, Homo sapiens
gcatacgaaacaaaatgtgtgttgc

SEQ ID NO: 3326 - DNA, 25 bp, Homo sapiens
catacgaaacaaaatgtgtgttgcg

SEQ ID NO: 3327 - DNA, 25 bp, Homo sapiens
atacgaaacaaaatgtgtgttgcgg

SEQ ID NO: 3328 - DNA, 25 bp, Homo sapiens
tacgaaacaaaatgtgtgttgcggc

SEQ ID NO: 3329 - DNA, 25 bp, Homo sapiens
acgaaacaaaatgtgtgttgcggcc

SEQ ID NO: 3330 - DNA, 25 bp, Homo sapiens
cgaaacaaaatgtgtgttgcggcct

SEQ ID NO: 3331 - DNA, 25 bp, Homo sapiens
gaaacaaaatgtgtgttgcggcctt

SEQ ID NO: 3332 - DNA, 25 bp, Homo sapiens
aaacaaaatgtgtgttgcggccttt

SEQ ID NO: 3333 - DNA, 25 bp, Homo sapiens
aacaaaatgtgtgttgcggcctttg

SEQ ID NO: 3334 - DNA, 25 bp, Homo sapiens
acaaaatgtgtgttgcggcctttgg

SEQ ID NO: 3335 - DNA, 25 bp, Homo sapiens
caaaatgtgtgttgcggcctttgga

SEQ ID NO: 3336 - DNA, 25 bp, Homo sapiens
aaaatgtgtgttgcggcctttggag

SEQ ID NO: 3337 - DNA, 25 bp, Homo sapiens
aaatgtgtgttgcggcctttggagt

SEQ ID NO: 3338 - DNA, 25 bp, Homo sapiens
aatgtgtgttgcggcctttggagtg

SEQ ID NO: 3339 - DNA, 25 bp, Homo sapiens
atgtgtgttgcggcctttggagtga

SEQ ID NO: 3340 - DNA, 25 bp, Homo sapiens
tgtgtgttgcggcctttggagtgat

SEQ ID NO: 3341 - DNA, 25 bp, Homo sapiens
gtgtgttgcggcctttggagtgatt

SEQ ID NO: 3342 - DNA, 25 bp, Homo sapiens
tgtgttgcggcctttggagtgattt

SEQ ID NO: 3343 - DNA, 25 bp, Homo sapiens
gtgttgcggcctttggagtgatttc

SEQ ID NO: 3344 - DNA, 25 bp, Homo sapiens
tgttgcggcctttggagtgatttct

SEQ ID NO: 3345 - DNA, 25 bp, Homo sapiens
gttgcggcctttggagtgatttctg

SEQ ID NO: 3346 - DNA, 25 bp, Homo sapiens
ttgcggcctttggagtgatttctgc

SEQ ID NO: 3347 - DNA, 25 bp, Homo sapiens
tgcggcctttggagtgatttctgct

SEQ ID NO: 3348 - DNA, 25 bp, Homo sapiens
gcggcctttggagtgatttctgctt

SEQ ID NO: 3349 - DNA, 25 bp, Homo sapiens
cggcctttggagtgatttctgcttt

SEQ ID NO: 3350 - DNA, 25 bp, Homo sapiens
ggcctttggagtgatttctgctttc

SEQ ID NO: 3351 - DNA, 25 bp, Homo sapiens
gcctttggagtgatttctgctttct

SEQ ID NO: 3352 - DNA, 25 bp, Homo sapiens
cctttggagtgatttctgctttctt

SEQ ID NO: 3353 - DNA, 25 bp, Homo sapiens
ctttggagtgatttctgctttcttg

SEQ ID NO: 3354 - DNA, 25 bp, Homo sapiens
tttggagtgatttctgctttcttgg

SEQ ID NO: 3355 - DNA, 25 bp, Homo sapiens
ttggagtgatttctgctttcttggc

SEQ ID NO: 3356 - DNA, 25 bp, Homo sapiens
tggagtgatttctgctttcttggca

SEQ ID NO: 3357 - DNA, 25 bp, Homo sapiens
ggagtgatttctgctttcttggcag

SEQ ID NO: 3358 - DNA, 25 bp, Homo sapiens
gagtgatttctgctttcttggcagt

SEQ ID NO: 3359 - DNA, 25 bp, Homo sapiens
agtgatttctgctttcttggcagtg

SEQ ID NO: 3360 - DNA, 25 bp, Homo sapiens
gtgatttctgctttcttggcagtgg

SEQ ID NO: 3361 - DNA, 25 bp, Homo sapiens
tgatttctgctttcttggcagtggt

SEQ ID NO: 3362 - DNA, 25 bp, Homo sapiens
gatttctgctttcttggcagtggtg

SEQ ID NO: 3363 - DNA, 25 bp, Homo sapiens
atttctgctttcttggcagtggtga

SEQ ID NO: 3364 - DNA, 25 bp, Homo sapiens
tttctgctttcttggcagtggtgag

SEQ ID NO: 3365 - DNA, 25 bp, Homo sapiens
ttctgctttcttggcagtggtgagc

SEQ ID NO: 3366 - DNA, 25 bp, Homo sapiens
tctgctttcttggcagtggtgagcg

SEQ ID NO: 3367 - DNA, 25 bp, Homo sapiens
ctgctttcttggcagtggtgagcgg

SEQ ID NO: 3368 - DNA, 25 bp, Homo sapiens
tgctttcttggcagtggtgagcggc

SEQ ID NO: 3369 - DNA, 25 bp, Homo sapiens
gctttcttggcagtggtgagcggct

SEQ ID NO: 3370 - DNA, 25 bp, Homo sapiens
ctttcttggcagtggtgagcggctt

SEQ ID NO: 3371 - DNA, 25 bp, Homo sapiens
tttcttggcagtggtgagcggcttt

SEQ ID NO: 3372 - DNA, 25 bp, Homo sapiens
ttcttggcagtggtgagcggctttg

SEQ ID NO: 3373 - DNA, 25 bp, Homo sapiens
tcttggcagtggtgagcggctttgg

SEQ ID NO: 3374 - DNA, 25 bp, Homo sapiens
cttggcagtggtgagcggctttggc

SEQ ID NO: 3375 - DNA, 25 bp, Homo sapiens
ttggcagtggtgagcggctttggcc

SEQ ID NO: 3376 - DNA, 25 bp, Homo sapiens
tggcagtggtgagcggctttggcct

SEQ ID NO: 3377 - DNA, 25 bp, Homo sapiens
ggcagtggtgagcggctttggcctg

SEQ ID NO: 3378 - DNA, 25 bp, Homo sapiens
gcagtggtgagcggctttggcctgc

SEQ ID NO: 3379 - DNA, 25 bp, Homo sapiens
cagtggtgagcggctttggcctgct

SEQ ID NO: 3380 - DNA, 25 bp, Homo sapiens
agtggtgagcggctttggcctgctg

SEQ ID NO: 3381 - DNA, 25 bp, Homo sapiens
gtggtgagcggctttggcctgctgt

SEQ ID NO: 3382 - DNA, 25 bp, Homo sapiens
tggtgagcggctttggcctgctgtt

SEQ ID NO: 3383 - DNA, 25 bp, Homo sapiens
ggtgagcggctttggcctgctgttg

SEQ ID NO: 3384 - DNA, 25 bp, Homo sapiens
gtgagcggctttggcctgctgttgc

SEQ ID NO: 3385 - DNA, 25 bp, Homo sapiens
tgagcggctttggcctgctgttgca

SEQ ID NO: 3386 - DNA, 25 bp, Homo sapiens
gagcggctttggcctgctgttgcac

SEQ ID NO: 3387 - DNA, 25 bp, Homo sapiens
agcggctttggcctgctgttgcaca

SEQ ID NO: 3388 - DNA, 25 bp, Homo sapiens
gcggctttggcctgctgttgcacat

SEQ ID NO: 3389 - DNA, 25 bp, Homo sapiens
cggctttggcctgctgttgcacatt

SEQ ID NO: 3390 - DNA, 25 bp, Homo sapiens
ggctttggcctgctgttgcacattg

SEQ ID NO: 3391 - DNA, 25 bp, Homo sapiens
gctttggcctgctgttgcacattgg

SEQ ID NO: 3392 - DNA, 25 bp, Homo sapiens
ctttggcctgctgttgcacattggg

SEQ ID NO: 3393 - DNA, 25 bp, Homo sapiens
tttggcctgctgttgcacattgggg

SEQ ID NO: 3394 - DNA, 25 bp, Homo sapiens
ttggcctgctgttgcacattggggt

SEQ ID NO: 3395 - DNA, 25 bp, Homo sapiens
tggcctgctgttgcacattggggtg

SEQ ID NO: 3396 - DNA, 25 bp, Homo sapiens
ggcctgctgttgcacattggggtgc

SEQ ID NO: 3397 - DNA, 25 bp, Homo sapiens
gcctgctgttgcacattggggtgcc

SEQ ID NO: 3398 - DNA, 25 bp, Homo sapiens
cctgctgttgcacattggggtgcca

SEQ ID NO: 3399 - DNA, 25 bp, Homo sapiens
ctgctgttgcacattggggtgccat

SEQ ID NO: 3400 - DNA, 25 bp, Homo sapiens
tgctgttgcacattggggtgccatt

SEQ ID NO: 3401 - DNA, 25 bp, Homo sapiens
gctgttgcacattggggtgccattt

SEQ ID NO: 3402 - DNA, 25 bp, Homo sapiens
ctgttgcacattggggtgccatttg

SEQ ID NO: 3403 - DNA, 25 bp, Homo sapiens
tgttgcacattggggtgccatttgt

SEQ ID NO: 3404 - DNA, 25 bp, Homo sapiens
gttgcacattggggtgccatttgtc

SEQ ID NO: 3405 - DNA, 25 bp, Homo sapiens
ttgcacattggggtgccatttgtca

SEQ ID NO: 3406 - DNA, 25 bp, Homo sapiens
tgcacattggggtgccatttgtcat

SEQ ID NO: 3407 - DNA, 25 bp, Homo sapiens
gcacattggggtgccatttgtcatc

SEQ ID NO: 3408 - DNA, 25 bp, Homo sapiens
cacattggggtgccatttgtcatca

SEQ ID NO: 3409 - DNA, 25 bp, Homo sapiens
acattggggtgccatttgtcatcat

SEQ ID NO: 3410 - DNA, 25 bp, Homo sapiens
cattggggtgccatttgtcatcata

SEQ ID NO: 3411 - DNA, 25 bp, Homo sapiens
attggggtgccatttgtcatcatag

SEQ ID NO: 3412 - DNA, 25 bp, Homo sapiens
ttggggtgccatttgtcatcatagt

SEQ ID NO: 3413 - DNA, 25 bp, Homo sapiens
tggggtgccatttgtcatcatagtt

SEQ ID NO: 3414 - DNA, 25 bp, Homo sapiens
ggggtgccatttgtcatcatagttg

SEQ ID NO: 3415 - DNA, 25 bp, Homo sapiens
gggtgccatttgtcatcatagttgc

SEQ ID NO: 3416 - DNA, 25 bp, Homo sapiens
ggtgccatttgtcatcatagttgcc

SEQ ID NO: 3417 - DNA, 25 bp, Homo sapiens
gtgccatttgtcatcatagttgcca

SEQ ID NO: 3418 - DNA, 25 bp, Homo sapiens
tgccatttgtcatcatagttgccaa

SEQ ID NO: 3419 - DNA, 25 bp, Homo sapiens
gccatttgtcatcatagttgccaat

SEQ ID NO: 3420 - DNA, 25 bp, Homo sapiens
ccatttgtcatcatagttgccaatt

SEQ ID NO: 3421 - DNA, 25 bp, Homo sapiens
catttgtcatcatagttgccaattc

SEQ ID NO: 3422 - DNA, 25 bp, Homo sapiens
atttgtcatcatagttgccaattca

SEQ ID NO: 3423 - DNA, 25 bp, Homo sapiens
tttgtcatcatagttgccaattcac

SEQ ID NO: 3424 - DNA, 25 bp, Homo sapiens
ttgtcatcatagttgccaattcacc

SEQ ID NO: 3425 - DNA, 25 bp, Homo sapiens
tgtcatcatagttgccaattcacca

SEQ ID NO: 3426 - DNA, 25 bp, Homo sapiens
gtcatcatagttgccaattcaccat

SEQ ID NO: 3427 - DNA, 25 bp, Homo sapiens
tcatcatagttgccaattcaccatt

SEQ ID NO: 3428 - DNA, 25 bp, Homo sapiens
catcatagttgccaattcaccattt

SEQ ID NO: 3429 - DNA, 25 bp, Homo sapiens
atcatagttgccaattcaccatttc

SEQ ID NO: 3430 - DNA, 25 bp, Homo sapiens
tcatagttgccaattcaccatttct

SEQ ID NO: 3431 - DNA, 25 bp, Homo sapiens
catagttgccaattcaccatttctt

SEQ ID NO: 3432 - DNA, 25 bp, Homo sapiens
atagttgccaattcaccatttctta

SEQ ID NO: 3433 - DNA, 25 bp, Homo sapiens
tagttgccaattcaccatttcttat

SEQ ID NO: 3434 - DNA, 25 bp, Homo sapiens
agttgccaattcaccatttcttatt

SEQ ID NO: 3435 - DNA, 25 bp, Homo sapiens
gttgccaattcaccatttcttattc

SEQ ID NO: 3436 - DNA, 25 bp, Homo sapiens
ttgccaattcaccatttcttattct

SEQ ID NO: 3437 - DNA, 25 bp, Homo sapiens
tgccaattcaccatttcttattcta

SEQ ID NO: 3438 - DNA, 25 bp, Homo sapiens
gccaattcaccatttcttattctag

SEQ ID NO: 3439 - DNA, 25 bp, Homo sapiens
ccaattcaccatttcttattctagg

SEQ ID NO: 3440 - DNA, 25 bp, Homo sapiens
caattcaccatttcttattctaggt

SEQ ID NO: 3441 - DNA, 25 bp, Homo sapiens
aattcaccatttcttattctaggtg

SEQ ID NO: 3442 - DNA, 25 bp, Homo sapiens
attcaccatttcttattctaggtgt

SEQ ID NO: 3443 - DNA, 25 bp, Homo sapiens
ttcaccatttcttattctaggtgtt

SEQ ID NO: 3444 - DNA, 25 bp, Homo sapiens
tcaccatttcttattctaggtgttg

SEQ ID NO: 3445 - DNA, 25 bp, Homo sapiens
caccatttcttattctaggtgttgg

SEQ ID NO: 3446 - DNA, 25 bp, Homo sapiens
accatttcttattctaggtgttggg

SEQ ID NO: 3447 - DNA, 25 bp, Homo sapiens
ccatttcttattctaggtgttgggg

SEQ ID NO: 3448 - DNA, 25 bp, Homo sapiens
catttcttattctaggtgttggggt

SEQ ID NO: 3449 - DNA, 25 bp, Homo sapiens
atttcttattctaggtgttggggtc

SEQ ID NO: 3450 - DNA, 25 bp, Homo sapiens
tttcttattctaggtgttggggtcg

SEQ ID NO: 3451 - DNA, 25 bp, Homo sapiens
ttcttattctaggtgttggggtcga

SEQ ID NO: 3452 - DNA, 25 bp, Homo sapiens
tcttattctaggtgttggggtcgat

SEQ ID NO: 3453 - DNA, 25 bp, Homo sapiens
cttattctaggtgttggggtcgatg

SEQ ID NO: 3454 - DNA, 25 bp, Homo sapiens
ttattctaggtgttggggtcgatga

SEQ ID NO: 3455 - DNA, 25 bp, Homo sapiens
tattctaggtgttggggtcgatgac

SEQ ID NO: 3456 - DNA, 25 bp, Homo sapiens
attctaggtgttggggtcgatgaca

SEQ ID NO: 3457 - DNA, 25 bp, Homo sapiens
ttctaggtgttggggtcgatgacat

SEQ ID NO: 3458 - DNA, 25 bp, Homo sapiens
tctaggtgttggggtcgatgacatg

SEQ ID NO: 3459 - DNA, 25 bp, Homo sapiens
ctaggtgttggggtcgatgacatgt

SEQ ID NO: 3460 - DNA, 25 bp, Homo sapiens
taggtgttggggtcgatgacatgtt

SEQ ID NO: 3461 - DNA, 25 bp, Homo sapiens
aggtgttggggtcgatgacatgttt

SEQ ID NO: 3462 - DNA, 25 bp, Homo sapiens
ggtgttggggtcgatgacatgttta

SEQ ID NO: 3463 - DNA, 25 bp, Homo sapiens
gtgttggggtcgatgacatgtttat

SEQ ID NO: 3464 - DNA, 25 bp, Homo sapiens
tgttggggtcgatgacatgtttatc

SEQ ID NO: 3465 - DNA, 25 bp, Homo sapiens
gttggggtcgatgacatgtttatca

SEQ ID NO: 3466 - DNA, 25 bp, Homo sapiens
ttggggtcgatgacatgtttatcat

SEQ ID NO: 3467 - DNA, 25 bp, Homo sapiens
tggggtcgatgacatgtttatcatg

SEQ ID NO: 3468 - DNA, 25 bp, Homo sapiens
ggggtcgatgacatgtttatcatga

SEQ ID NO: 3469 - DNA, 25 bp, Homo sapiens
gggtcgatgacatgtttatcatgat

SEQ ID NO: 3470 - DNA, 25 bp, Homo sapiens
ggtcgatgacatgtttatcatgatt

SEQ ID NO: 3471 - DNA, 25 bp, Homo sapiens
gtcgatgacatgtttatcatgattt

SEQ ID NO: 3472 - DNA, 25 bp, Homo sapiens
tcgatgacatgtttatcatgatttc

SEQ ID NO: 3473 - DNA, 25 bp, Homo sapiens
cgatgacatgtttatcatgatttct

SEQ ID NO: 3474 - DNA, 25 bp, Homo sapiens
gatgacatgtttatcatgatttctg

SEQ ID NO: 3475 - DNA, 25 bp, Homo sapiens
atgacatgtttatcatgatttctgc

SEQ ID NO: 3476 - DNA, 25 bp, Homo sapiens
tgacatgtttatcatgatttctgcc

SEQ ID NO: 3477 - DNA, 25 bp, Homo sapiens
gacatgtttatcatgatttctgcct

SEQ ID NO: 3478 - DNA, 25 bp, Homo sapiens
acatgtttatcatgatttctgcctg

SEQ ID NO: 3479 - DNA, 25 bp, Homo sapiens
catgtttatcatgatttctgcctgg

SEQ ID NO: 3480 - DNA, 25 bp, Homo sapiens
atgtttatcatgatttctgcctggc

SEQ ID NO: 3481 - DNA, 25 bp, Homo sapiens
tgtttatcatgatttctgcctggca

SEQ ID NO: 3482 - DNA, 25 bp, Homo sapiens
gtttatcatgatttctgcctggcat

SEQ ID NO: 3483 - DNA, 25 bp, Homo sapiens
tttatcatgatttctgcctggcata

SEQ ID NO: 3484 - DNA, 25 bp, Homo sapiens
ttatcatgatttctgcctggcataa

SEQ ID NO: 3485 - DNA, 25 bp, Homo sapiens
tatcatgatttctgcctggcataag

SEQ ID NO: 3486 - DNA, 25 bp, Homo sapiens
atcatgatttctgcctggcataaga

SEQ ID NO: 3487 - DNA, 25 bp, Homo sapiens
tcatgatttctgcctggcataagac

SEQ ID NO: 3488 - DNA, 25 bp, Homo sapiens
catgatttctgcctggcataagacc

SEQ ID NO: 3489 - DNA, 25 bp, Homo sapiens
atgatttctgcctggcataagacca

SEQ ID NO: 3490 - DNA, 25 bp, Homo sapiens
tgatttctgcctggcataagaccaa

SEQ ID NO: 3491 - DNA, 25 bp, Homo sapiens
gatttctgcctggcataagaccaac

SEQ ID NO: 3492 - DNA, 25 bp, Homo sapiens
atttctgcctggcataagaccaacc

SEQ ID NO: 3493 - DNA, 25 bp, Homo sapiens
tttctgcctggcataagaccaacct

SEQ ID NO: 3494 - DNA, 25 bp, Homo sapiens
ttctgcctggcataagaccaacctt

SEQ ID NO: 3495 - DNA, 25 bp, Homo sapiens
tctgcctggcataagaccaaccttg

SEQ ID NO: 3496 - DNA, 25 bp, Homo sapiens
ctgcctggcataagaccaaccttgc

SEQ ID NO: 3497 - DNA, 25 bp, Homo sapiens
tgcctggcataagaccaaccttgca

SEQ ID NO: 3498 - DNA, 25 bp, Homo sapiens
gcctggcataagaccaaccttgcag

SEQ ID NO: 3499 - DNA, 25 bp, Homo sapiens
cctggcataagaccaaccttgcagg

SEQ ID NO: 3500 - DNA, 25 bp, Homo sapiens
ctggcataagaccaaccttgcaggt

SEQ ID NO: 3501 - DNA, 25 bp, Homo sapiens
tggcataagaccaaccttgcaggtg

SEQ ID NO: 3502 - DNA, 25 bp, Homo sapiens
ggcataagaccaaccttgcaggtga

SEQ ID NO: 3503 - DNA, 25 bp, Homo sapiens
gcataagaccaaccttgcaggtgac

SEQ ID NO: 3504 - DNA, 25 bp, Homo sapiens
cataagaccaaccttgcaggtgaca

SEQ ID NO: 3505 - DNA, 25 bp, Homo sapiens
ataagaccaaccttgcaggtgacat

SEQ ID NO: 3506 - DNA, 25 bp, Homo sapiens
taagaccaaccttgcaggtgacata

SEQ ID NO: 3507 - DNA, 25 bp, Homo sapiens
aagaccaaccttgcaggtgacatac

SEQ ID NO: 3508 - DNA, 25 bp, Homo sapiens
agaccaaccttgcaggtgacatacg

SEQ ID NO: 3509 - DNA, 25 bp, Homo sapiens
gaccaaccttgcaggtgacatacga

SEQ ID NO: 3510 - DNA, 25 bp, Homo sapiens
accaaccttgcaggtgacatacgag

SEQ ID NO: 3511 - DNA, 25 bp, Homo sapiens
ccaaccttgcaggtgacatacgaga

SEQ ID NO: 3512 - DNA, 25 bp, Homo sapiens
caaccttgcaggtgacatacgagag

SEQ ID NO: 3513 - DNA, 25 bp, Homo sapiens
aaccttgcaggtgacatacgagagc

SEQ ID NO: 3514 - DNA, 25 bp, Homo sapiens
accttgcaggtgacatacgagagcg

SEQ ID NO: 3515 - DNA, 25 bp, Homo sapiens
ccttgcaggtgacatacgagagcgg

SEQ ID NO: 3516 - DNA, 25 bp, Homo sapiens
cttgcaggtgacatacgagagcgga

SEQ ID NO: 3517 - DNA, 25 bp, Homo sapiens
ttgcaggtgacatacgagagcggat

SEQ ID NO: 3518 - DNA, 25 bp, Homo sapiens
tgcaggtgacatacgagagcggatg

SEQ ID NO: 3519 - DNA, 25 bp, Homo sapiens
gcaggtgacatacgagagcggatgt

SEQ ID NO: 3520 - DNA, 25 bp, Homo sapiens
caggtgacatacgagagcggatgtc

SEQ ID NO: 3521 - DNA, 25 bp, Homo sapiens
aggtgacatacgagagcggatgtcc

SEQ ID NO: 3522 - DNA, 25 bp, Homo sapiens
ggtgacatacgagagcggatgtcca

SEQ ID NO: 3523 - DNA, 25 bp, Homo sapiens
gtgacatacgagagcggatgtccaa

SEQ ID NO: 3524 - DNA, 25 bp, Homo sapiens
tgacatacgagagcggatgtccaat

SEQ ID NO: 3525 - DNA, 25 bp, Homo sapiens
gacatacgagagcggatgtccaatg

SEQ ID NO: 3526 - DNA, 25 bp, Homo sapiens
acatacgagagcggatgtccaatgt

SEQ ID NO: 3527 - DNA, 25 bp, Homo sapiens
catacgagagcggatgtccaatgtc

SEQ ID NO: 3528 - DNA, 25 bp, Homo sapiens
atacgagagcggatgtccaatgtct

SEQ ID NO: 3529 - DNA, 25 bp, Homo sapiens
tacgagagcggatgtccaatgtcta

SEQ ID NO: 3530 - DNA, 25 bp, Homo sapiens
acgagagcggatgtccaatgtctat

SEQ ID NO: 3531 - DNA, 25 bp, Homo sapiens
cgagagcggatgtccaatgtctatt

SEQ ID NO: 3532 - DNA, 25 bp, Homo sapiens
gagagcggatgtccaatgtctattc

SEQ ID NO: 3533 - DNA, 25 bp, Homo sapiens
agagcggatgtccaatgtctattca

SEQ ID NO: 3534 - DNA, 25 bp, Homo sapiens
gagcggatgtccaatgtctattcaa

SEQ ID NO: 3535 - DNA, 25 bp, Homo sapiens
agcggatgtccaatgtctattcaaa

SEQ ID NO: 3536 - DNA, 25 bp, Homo sapiens
gcggatgtccaatgtctattcaaaa

SEQ ID NO: 3537 - DNA, 25 bp, Homo sapiens
cggatgtccaatgtctattcaaaag

SEQ ID NO: 3538 - DNA, 25 bp, Homo sapiens
ggatgtccaatgtctattcaaaagc

SEQ ID NO: 3539 - DNA, 25 bp, Homo sapiens
gatgtccaatgtctattcaaaagcg

SEQ ID NO: 3540 - DNA, 25 bp, Homo sapiens
atgtccaatgtctattcaaaagcgg

SEQ ID NO: 3541 - DNA, 25 bp, Homo sapiens
tgtccaatgtctattcaaaagcggc

SEQ ID NO: 3542 - DNA, 25 bp, Homo sapiens
gtccaatgtctattcaaaagcggca

SEQ ID NO: 3543 - DNA, 25 bp, Homo sapiens
tccaatgtctattcaaaagcggcag

SEQ ID NO: 3544 - DNA, 25 bp, Homo sapiens
ccaatgtctattcaaaagcggcagt

SEQ ID NO: 3545 - DNA, 25 bp, Homo sapiens
caatgtctattcaaaagcggcagtg

SEQ ID NO: 3546 - DNA, 25 bp, Homo sapiens
aatgtctattcaaaagcggcagtgt

SEQ ID NO: 3547 - DNA, 25 bp, Homo sapiens
atgtctattcaaaagcggcagtgtc

SEQ ID NO: 3548 - DNA, 25 bp, Homo sapiens
tgtctattcaaaagcggcagtgtct

SEQ ID NO: 3549 - DNA, 25 bp, Homo sapiens
gtctattcaaaagcggcagtgtcta

SEQ ID NO: 3550 - DNA, 25 bp, Homo sapiens
tctattcaaaagcggcagtgtctat

SEQ ID NO: 3551 - DNA, 25 bp, Homo sapiens
ctattcaaaagcggcagtgtctatt

SEQ ID NO: 3552 - DNA, 25 bp, Homo sapiens
tattcaaaagcggcagtgtctatta

SEQ ID NO: 3553 - DNA, 25 bp, Homo sapiens
attcaaaagcggcagtgtctattac

SEQ ID NO: 3554 - DNA, 25 bp, Homo sapiens
ttcaaaagcggcagtgtctattaca

SEQ ID NO: 3555 - DNA, 25 bp, Homo sapiens
tcaaaagcggcagtgtctattacaa

SEQ ID NO: 3556 - DNA, 25 bp, Homo sapiens
caaaagcggcagtgtctattacaat

SEQ ID NO: 3557 - DNA, 25 bp, Homo sapiens
aaaagcggcagtgtctattacaatc

SEQ ID NO: 3558 - DNA, 25 bp, Homo sapiens
aaagcggcagtgtctattacaatca

SEQ ID NO: 3559 - DNA, 25 bp, Homo sapiens
aagcggcagtgtctattacaatcac

SEQ ID NO: 3560 - DNA, 25 bp, Homo sapiens
agcggcagtgtctattacaatcacc

SEQ ID NO: 3561 - DNA, 25 bp, Homo sapiens
gcggcagtgtctattacaatcacca

SEQ ID NO: 3562 - DNA, 25 bp, Homo sapiens
cggcagtgtctattacaatcaccac

SEQ ID NO: 3563 - DNA, 25 bp, Homo sapiens
ggcagtgtctattacaatcaccacc

SEQ ID NO: 3564 - DNA, 25 bp, Homo sapiens
gcagtgtctattacaatcaccacca

SEQ ID NO: 3565 - DNA, 25 bp, Homo sapiens
cagtgtctattacaatcaccaccat

SEQ ID NO: 3566 - DNA, 25 bp, Homo sapiens
agtgtctattacaatcaccaccatc

SEQ ID NO: 3567 - DNA, 25 bp, Homo sapiens
gtgtctattacaatcaccaccatca

SEQ ID NO: 3568 - DNA, 25 bp, Homo sapiens
tgtctattacaatcaccaccatcac

SEQ ID NO: 3569 - DNA, 25 bp, Homo sapiens
gtctattacaatcaccaccatcact

SEQ ID NO: 3570 - DNA, 25 bp, Homo sapiens
tctattacaatcaccaccatcacta

SEQ ID NO: 3571 - DNA, 25 bp, Homo sapiens
ctattacaatcaccaccatcactaa

SEQ ID NO: 3572 - DNA, 25 bp, Homo sapiens
tattacaatcaccaccatcactaac

SEQ ID NO: 3573 - DNA, 25 bp, Homo sapiens
attacaatcaccaccatcactaaca

SEQ ID NO: 3574 - DNA, 25 bp, Homo sapiens
ttacaatcaccaccatcactaacat

SEQ ID NO: 3575 - DNA, 25 bp, Homo sapiens
tacaatcaccaccatcactaacatc

SEQ ID NO: 3576 - DNA, 25 bp, Homo sapiens
acaatcaccaccatcactaacatcc

SEQ ID NO: 3577 - DNA, 25 bp, Homo sapiens
caatcaccaccatcactaacatcct

SEQ ID NO: 3578 - DNA, 25 bp, Homo sapiens
aatcaccaccatcactaacatcctg

SEQ ID NO: 3579 - DNA, 25 bp, Homo sapiens
atcaccaccatcactaacatcctgg

SEQ ID NO: 3580 - DNA, 25 bp, Homo sapiens
tcaccaccatcactaacatcctggc

SEQ ID NO: 3581 - DNA, 25 bp, Homo sapiens
caccaccatcactaacatcctggcc

SEQ ID NO: 3582 - DNA, 25 bp, Homo sapiens
accaccatcactaacatcctggcct

SEQ ID NO: 3583 - DNA, 25 bp, Homo sapiens
ccaccatcactaacatcctggcctt

SEQ ID NO: 3584 - DNA, 25 bp, Homo sapiens
caccatcactaacatcctggcctta

SEQ ID NO: 3585 - DNA, 25 bp, Homo sapiens
accatcactaacatcctggccttat

SEQ ID NO: 3586 - DNA, 25 bp, Homo sapiens
ccatcactaacatcctggccttata

SEQ ID NO: 3587 - DNA, 25 bp, Homo sapiens
catcactaacatcctggccttatat

SEQ ID NO: 3588 - DNA, 25 bp, Homo sapiens
atcactaacatcctggccttatata

SEQ ID NO: 3589 - DNA, 25 bp, Homo sapiens
tcactaacatcctggccttatatac

SEQ ID NO: 3590 - DNA, 25 bp, Homo sapiens
cactaacatcctggccttatataca

SEQ ID NO: 3591 - DNA, 25 bp, Homo sapiens
actaacatcctggccttatatacag

SEQ ID NO: 3592 - DNA, 25 bp, Homo sapiens
ctaacatcctggccttatatacagg

SEQ ID NO: 3593 - DNA, 25 bp, Homo sapiens
taacatcctggccttatatacaggg

SEQ ID NO: 3594 - DNA, 25 bp, Homo sapiens
aacatcctggccttatatacaggga

SEQ ID NO: 3595 - DNA, 25 bp, Homo sapiens
acatcctggccttatatacagggat

SEQ ID NO: 3596 - DNA, 25 bp, Homo sapiens
catcctggccttatatacagggatt

SEQ ID NO: 3597 - DNA, 25 bp, Homo sapiens
atcctggccttatatacagggatta

SEQ ID NO: 3598 - DNA, 25 bp, Homo sapiens
tcctggccttatatacagggattat

SEQ ID NO: 3599 - DNA, 25 bp, Homo sapiens
cctggccttatatacagggattatg

SEQ ID NO: 3600 - DNA, 25 bp, Homo sapiens
ctggccttatatacagggattatga

SEQ ID NO: 3601 - DNA, 25 bp, Homo sapiens
tggccttatatacagggattatgag

SEQ ID NO: 3602 - DNA, 25 bp, Homo sapiens
ggccttatatacagggattatgagc

SEQ ID NO: 3603 - DNA, 25 bp, Homo sapiens
gccttatatacagggattatgagct

SEQ ID NO: 3604 - DNA, 25 bp, Homo sapiens
ccttatatacagggattatgagctc

SEQ ID NO: 3605 - DNA, 25 bp, Homo sapiens
cttatatacagggattatgagctct

SEQ ID NO: 3606 - DNA, 25 bp, Homo sapiens
ttatatacagggattatgagctctt

SEQ ID NO: 3607 - DNA, 25 bp, Homo sapiens
tatatacagggattatgagctcttt

SEQ ID NO: 3608 - DNA, 25 bp, Homo sapiens
atatacagggattatgagctctttt

SEQ ID NO: 3609 - DNA, 25 bp, Homo sapiens
tatacagggattatgagctctttta

SEQ ID NO: 3610 - DNA, 25 bp, Homo sapiens
atacagggattatgagctcttttag

SEQ ID NO: 3611 - DNA, 25 bp, Homo sapiens
tacagggattatgagctcttttagg

SEQ ID NO: 3612 - DNA, 25 bp, Homo sapiens
acagggattatgagctcttttaggt

SEQ ID NO: 3613 - DNA, 25 bp, Homo sapiens
cagggattatgagctcttttaggtc

SEQ ID NO: 3614 - DNA, 25 bp, Homo sapiens
agggattatgagctcttttaggtcc

SEQ ID NO: 3615 - DNA, 25 bp, Homo sapiens
gggattatgagctcttttaggtccg

SEQ ID NO: 3616 - DNA, 25 bp, Homo sapiens
ggattatgagctcttttaggtccgt

SEQ ID NO: 3617 - DNA, 25 bp, Homo sapiens
gattatgagctcttttaggtccgta

SEQ ID NO: 3618 - DNA, 25 bp, Homo sapiens
attatgagctcttttaggtccgtac

SEQ ID NO: 3619 - DNA, 25 bp, Homo sapiens
ttatgagctcttttaggtccgtaca

SEQ ID NO: 3620 - DNA, 25 bp, Homo sapiens
tatgagctcttttaggtccgtacaa

SEQ ID NO: 3621 - DNA, 25 bp, Homo sapiens
atgagctcttttaggtccgtacaat

SEQ ID NO: 3622 - DNA, 25 bp, Homo sapiens
tgagctcttttaggtccgtacaatg

SEQ ID NO: 3623 - DNA, 25 bp, Homo sapiens
gagctcttttaggtccgtacaatgt

SEQ ID NO: 3624 - DNA, 25 bp, Homo sapiens
agctcttttaggtccgtacaatgtt

SEQ ID NO: 3625 - DNA, 25 bp, Homo sapiens
gctcttttaggtccgtacaatgttt

SEQ ID NO: 3626 - DNA, 25 bp, Homo sapiens
ctcttttaggtccgtacaatgtttt

SEQ ID NO: 3627 - DNA, 25 bp, Homo sapiens
tcttttaggtccgtacaatgttttt

SEQ ID NO: 3628 - DNA, 25 bp, Homo sapiens
cttttaggtccgtacaatgtttttg

SEQ ID NO: 3629 - DNA, 25 bp, Homo sapiens
ttttaggtccgtacaatgtttttgc

SEQ ID NO: 3630 - DNA, 25 bp, Homo sapiens
tttaggtccgtacaatgtttttgca

SEQ ID NO: 3631 - DNA, 25 bp, Homo sapiens
ttaggtccgtacaatgtttttgcat

SEQ ID NO: 3632 - DNA, 25 bp, Homo sapiens
taggtccgtacaatgtttttgcatc

SEQ ID NO: 3633 - DNA, 25 bp, Homo sapiens
aggtccgtacaatgtttttgcatct

SEQ ID NO: 3634 - DNA, 25 bp, Homo sapiens
ggtccgtacaatgtttttgcatcta

SEQ ID NO: 3635 - DNA, 25 bp, Homo sapiens
gtccgtacaatgtttttgcatctat

SEQ ID NO: 3636 - DNA, 25 bp, Homo sapiens
tccgtacaatgtttttgcatctata

SEQ ID NO: 3637 - DNA, 25 bp, Homo sapiens
ccgtacaatgtttttgcatctatac

SEQ ID NO: 3638 - DNA, 25 bp, Homo sapiens
cgtacaatgtttttgcatctataca

SEQ ID NO: 3639 - DNA, 25 bp, Homo sapiens
gtacaatgtttttgcatctatacag

SEQ ID NO: 3640 - DNA, 25 bp, Homo sapiens
tacaatgtttttgcatctatacagg

SEQ ID NO: 3641 - DNA, 25 bp, Homo sapiens
acaatgtttttgcatctatacagga

SEQ ID NO: 3642 - DNA, 25 bp, Homo sapiens
caatgtttttgcatctatacaggaa

SEQ ID NO: 3643 - DNA, 25 bp, Homo sapiens
aatgtttttgcatctatacaggaac

SEQ ID NO: 3644 - DNA, 25 bp, Homo sapiens
atgtttttgcatctatacaggaacg

SEQ ID NO: 3645 - DNA, 25 bp, Homo sapiens
tgtttttgcatctatacaggaacga

SEQ ID NO: 3646 - DNA, 25 bp, Homo sapiens
gtttttgcatctatacaggaacgac

SEQ ID NO: 3647 - DNA, 25 bp, Homo sapiens
tttttgcatctatacaggaacgacc

SEQ ID NO: 3648 - DNA, 25 bp, Homo sapiens
ttttgcatctatacaggaacgaccc

SEQ ID NO: 3649 - DNA, 25 bp, Homo sapiens
tttgcatctatacaggaacgaccct

SEQ ID NO: 3650 - DNA, 25 bp, Homo sapiens
ttgcatctatacaggaacgaccctg

SEQ ID NO: 3651 - DNA, 25 bp, Homo sapiens
tgcatctatacaggaacgaccctgt

SEQ ID NO: 3652 - DNA, 25 bp, Homo sapiens
gcatctatacaggaacgaccctgtt

SEQ ID NO: 3653 - DNA, 25 bp, Homo sapiens
catctatacaggaacgaccctgtta

SEQ ID NO: 3654 - DNA, 25 bp, Homo sapiens
atctatacaggaacgaccctgttat

SEQ ID NO: 3655 - DNA, 25 bp, Homo sapiens
tctatacaggaacgaccctgttatt

SEQ ID NO: 3656 - DNA, 25 bp, Homo sapiens
ctatacaggaacgaccctgttattt

SEQ ID NO: 3657 - DNA, 25 bp, Homo sapiens
tatacaggaacgaccctgttatttt

SEQ ID NO: 3658 - DNA, 25 bp, Homo sapiens
atacaggaacgaccctgttattttg

SEQ ID NO: 3659 - DNA, 25 bp, Homo sapiens
tacaggaacgaccctgttattttgc

SEQ ID NO: 3660 - DNA, 25 bp, Homo sapiens
acaggaacgaccctgttattttgct

SEQ ID NO: 3661 - DNA, 25 bp, Homo sapiens
caggaacgaccctgttattttgcta

SEQ ID NO: 3662 - DNA, 25 bp, Homo sapiens
aggaacgaccctgttattttgctat

SEQ ID NO: 3663 - DNA, 25 bp, Homo sapiens
ggaacgaccctgttattttgctatt

SEQ ID NO: 3664 - DNA, 25 bp, Homo sapiens
gaacgaccctgttattttgctattt

SEQ ID NO: 3665 - DNA, 25 bp, Homo sapiens
aacgaccctgttattttgctatttt

SEQ ID NO: 3666 - DNA, 25 bp, Homo sapiens
acgaccctgttattttgctattttt

SEQ ID NO: 3667 - DNA, 25 bp, Homo sapiens
cgaccctgttattttgctattttta

SEQ ID NO: 3668 - DNA, 25 bp, Homo sapiens
gaccctgttattttgctatttttat

SEQ ID NO: 3669 - DNA, 25 bp, Homo sapiens
accctgttattttgctatttttata

SEQ ID NO: 3670 - DNA, 25 bp, Homo sapiens
ccctgttattttgctatttttataa

SEQ ID NO: 3671 - DNA, 25 bp, Homo sapiens
cctgttattttgctatttttataac

SEQ ID NO: 3672 - DNA, 25 bp, Homo sapiens
ctgttattttgctatttttataaca

SEQ ID NO: 3673 - DNA, 25 bp, Homo sapiens
tgttattttgctatttttataacat

SEQ ID NO: 3674 - DNA, 25 bp, Homo sapiens
gttattttgctatttttataacatc

SEQ ID NO: 3675 - DNA, 25 bp, Homo sapiens
ttattttgctatttttataacatca

SEQ ID NO: 3676 - DNA, 25 bp, Homo sapiens
tattttgctatttttataacatcac

SEQ ID NO: 3677 - DNA, 25 bp, Homo sapiens
attttgctatttttataacatcacg

SEQ ID NO: 3678 - DNA, 25 bp, Homo sapiens
ttttgctatttttataacatcacgt

SEQ ID NO: 3679 - DNA, 25 bp, Homo sapiens
tttgctatttttataacatcacgtg

SEQ ID NO: 3680 - DNA, 25 bp, Homo sapiens
ttgctatttttataacatcacgtgt

SEQ ID NO: 3681 - DNA, 25 bp, Homo sapiens
tgctatttttataacatcacgtgtt

SEQ ID NO: 3682 - DNA, 25 bp, Homo sapiens
gctatttttataacatcacgtgttt

SEQ ID NO: 3683 - DNA, 25 bp, Homo sapiens
ctatttttataacatcacgtgtttt

SEQ ID NO: 3684 - DNA, 25 bp, Homo sapiens
tatttttataacatcacgtgttttg

SEQ ID NO: 3685 - DNA, 25 bp, Homo sapiens
atttttataacatcacgtgttttgg

SEQ ID NO: 3686 - DNA, 25 bp, Homo sapiens
tttttataacatcacgtgttttgga

SEQ ID NO: 3687 - DNA, 25 bp, Homo sapiens
ttttataacatcacgtgttttggag

SEQ ID NO: 3688 - DNA, 25 bp, Homo sapiens
tttataacatcacgtgttttggagc

SEQ ID NO: 3689 - DNA, 25 bp, Homo sapiens
ttataacatcacgtgttttggagca

SEQ ID NO: 3690 - DNA, 25 bp, Homo sapiens
tataacatcacgtgttttggagcat

SEQ ID NO: 3691 - DNA, 25 bp, Homo sapiens
ataacatcacgtgttttggagcatt

SEQ ID NO: 3692 - DNA, 25 bp, Homo sapiens
taacatcacgtgttttggagcattt

SEQ ID NO: 3693 - DNA, 25 bp, Homo sapiens
aacatcacgtgttttggagcattta

SEQ ID NO: 3694 - DNA, 25 bp, Homo sapiens
acatcacgtgttttggagcatttat

SEQ ID NO: 3695 - DNA, 25 bp, Homo sapiens
catcacgtgttttggagcatttatg

SEQ ID NO: 3696 - DNA, 25 bp, Homo sapiens
atcacgtgttttggagcatttatgg

SEQ ID NO: 3697 - DNA, 25 bp, Homo sapiens
tcacgtgttttggagcatttatggc

SEQ ID NO: 3698 - DNA, 25 bp, Homo sapiens
cacgtgttttggagcatttatggcc

SEQ ID NO: 3699 - DNA, 25 bp, Homo sapiens
acgtgttttggagcatttatggcct

SEQ ID NO: 3700 - DNA, 25 bp, Homo sapiens
cgtgttttggagcatttatggcctt

SEQ ID NO: 3701 - DNA, 25 bp, Homo sapiens
gtgttttggagcatttatggccttg

SEQ ID NO: 3702 - DNA, 25 bp, Homo sapiens
tgttttggagcatttatggccttgg

SEQ ID NO: 3703 - DNA, 25 bp, Homo sapiens
gttttggagcatttatggccttgga

SEQ ID NO: 3704 - DNA, 25 bp, Homo sapiens
ttttggagcatttatggccttggat

SEQ ID NO: 3705 - DNA, 25 bp, Homo sapiens
tttggagcatttatggccttggatg

SEQ ID NO: 3706 - DNA, 25 bp, Homo sapiens
ttggagcatttatggccttggatgg

SEQ ID NO: 3707 - DNA, 25 bp, Homo sapiens
tggagcatttatggccttggatggt

SEQ ID NO: 3708 - DNA, 25 bp, Homo sapiens
ggagcatttatggccttggatggta

SEQ ID NO: 3709 - DNA, 25 bp, Homo sapiens
gagcatttatggccttggatggtaa

SEQ ID NO: 3710 - DNA, 25 bp, Homo sapiens
agcatttatggccttggatggtaaa

SEQ ID NO: 3711 - DNA, 25 bp, Homo sapiens
gcatttatggccttggatggtaaaa

SEQ ID NO: 3712 - DNA, 25 bp, Homo sapiens
catttatggccttggatggtaaaag

SEQ ID NO: 3713 - DNA, 25 bp, Homo sapiens
atttatggccttggatggtaaaaga

SEQ ID NO: 3714 - DNA, 25 bp, Homo sapiens
tttatggccttggatggtaaaagag

SEQ ID NO: 3715 - DNA, 25 bp, Homo sapiens
ttatggccttggatggtaaaagaga

SEQ ID NO: 3716 - DNA, 25 bp, Homo sapiens
tatggccttggatggtaaaagagaa

SEQ ID NO: 3717 - DNA, 25 bp, Homo sapiens
atggccttggatggtaaaagagaag

SEQ ID NO: 3718 - DNA, 25 bp, Homo sapiens
tggccttggatggtaaaagagaagt

SEQ ID NO: 3719 - DNA, 25 bp, Homo sapiens
ggccttggatggtaaaagagaagta

SEQ ID NO: 3720 - DNA, 25 bp, Homo sapiens
gccttggatggtaaaagagaagtag

SEQ ID NO: 3721 - DNA, 25 bp, Homo sapiens
ccttggatggtaaaagagaagtagt

SEQ ID NO: 3722 - DNA, 25 bp, Homo sapiens
cttggatggtaaaagagaagtagtc

SEQ ID NO: 3723 - DNA, 25 bp, Homo sapiens
ttggatggtaaaagagaagtagtct

SEQ ID NO: 3724 - DNA, 25 bp, Homo sapiens
tggatggtaaaagagaagtagtctg

SEQ ID NO: 3725 - DNA, 25 bp, Homo sapiens
ggatggtaaaagagaagtagtctgc

SEQ ID NO: 3726 - DNA, 25 bp, Homo sapiens
gatggtaaaagagaagtagtctgcc

SEQ ID NO: 3727 - DNA, 25 bp, Homo sapiens
atggtaaaagagaagtagtctgcct

SEQ ID NO: 3728 - DNA, 25 bp, Homo sapiens
tggtaaaagagaagtagtctgccta

SEQ ID NO: 3729 - DNA, 25 bp, Homo sapiens
ggtaaaagagaagtagtctgcctat

SEQ ID NO: 3730 - DNA, 25 bp, Homo sapiens
gtaaaagagaagtagtctgcctatg

SEQ ID NO: 3731 - DNA, 25 bp, Homo sapiens
taaaagagaagtagtctgcctatgc

SEQ ID NO: 3732 - DNA, 25 bp, Homo sapiens
aaaagagaagtagtctgcctatgct

SEQ ID NO: 3733 - DNA, 25 bp, Homo sapiens
aaagagaagtagtctgcctatgctg

SEQ ID NO: 3734 - DNA, 25 bp, Homo sapiens
aagagaagtagtctgcctatgctgg

SEQ ID NO: 3735 - DNA, 25 bp, Homo sapiens
agagaagtagtctgcctatgctggt

SEQ ID NO: 3736 - DNA, 25 bp, Homo sapiens
gagaagtagtctgcctatgctggtt

SEQ ID NO: 3737 - DNA, 25 bp, Homo sapiens
agaagtagtctgcctatgctggttg

SEQ ID NO: 3738 - DNA, 25 bp, Homo sapiens
gaagtagtctgcctatgctggttga

SEQ ID NO: 3739 - DNA, 25 bp, Homo sapiens
aagtagtctgcctatgctggttgaa

SEQ ID NO: 3740 - DNA, 25 bp, Homo sapiens
agtagtctgcctatgctggttgaaa

SEQ ID NO: 3741 - DNA, 25 bp, Homo sapiens
gtagtctgcctatgctggttgaaaa

SEQ ID NO: 3742 - DNA, 25 bp, Homo sapiens
tagtctgcctatgctggttgaaaaa

SEQ ID NO: 3743 - DNA, 25 bp, Homo sapiens
agtctgcctatgctggttgaaaaag

SEQ ID NO: 3744 - DNA, 25 bp, Homo sapiens
gtctgcctatgctggttgaaaaagg

SEQ ID NO: 3745 - DNA, 25 bp, Homo sapiens
tctgcctatgctggttgaaaaaggc

SEQ ID NO: 3746 - DNA, 25 bp, Homo sapiens
ctgcctatgctggttgaaaaaggct

SEQ ID NO: 3747 - DNA, 25 bp, Homo sapiens
tgcctatgctggttgaaaaaggctg

SEQ ID NO: 3748 - DNA, 25 bp, Homo sapiens
gcctatgctggttgaaaaaggctga

SEQ ID NO: 3749 - DNA, 25 bp, Homo sapiens
cctatgctggttgaaaaaggctgac

SEQ ID NO: 3750 - DNA, 25 bp, Homo sapiens
ctatgctggttgaaaaaggctgacc

SEQ ID NO: 3751 - DNA, 25 bp, Homo sapiens
tatgctggttgaaaaaggctgaccc

SEQ ID NO: 3752 - DNA, 25 bp, Homo sapiens
atgctggttgaaaaaggctgaccca

SEQ ID NO: 3753 - DNA, 25 bp, Homo sapiens
tgctggttgaaaaaggctgacccaa

SEQ ID NO: 3754 - DNA, 25 bp, Homo sapiens
gctggttgaaaaaggctgacccaaa

SEQ ID NO: 3755 - DNA, 25 bp, Homo sapiens
ctggttgaaaaaggctgacccaaaa

SEQ ID NO: 3756 - DNA, 25 bp, Homo sapiens
tggttgaaaaaggctgacccaaaat

SEQ ID NO: 3757 - DNA, 25 bp, Homo sapiens
ggttgaaaaaggctgacccaaaatg

SEQ ID NO: 3758 - DNA, 25 bp, Homo sapiens
gttgaaaaaggctgacccaaaatgg

SEQ ID NO: 3759 - DNA, 25 bp, Homo sapiens
ttgaaaaaggctgacccaaaatggc

SEQ ID NO: 3760 - DNA, 25 bp, Homo sapiens
tgaaaaaggctgacccaaaatggcc

SEQ ID NO: 3761 - DNA, 25 bp, Homo sapiens
gaaaaaggctgacccaaaatggccc

SEQ ID NO: 3762 - DNA, 25 bp, Homo sapiens
aaaaaggctgacccaaaatggccct

SEQ ID NO: 3763 - DNA, 25 bp, Homo sapiens
aaaaggctgacccaaaatggccctc

SEQ ID NO: 3764 - DNA, 25 bp, Homo sapiens
aaaggctgacccaaaatggccctca

SEQ ID NO: 3765 - DNA, 25 bp, Homo sapiens
aaggctgacccaaaatggccctcat

SEQ ID NO: 3766 - DNA, 25 bp, Homo sapiens
aggctgacccaaaatggccctcatt

SEQ ID NO: 3767 - DNA, 25 bp, Homo sapiens
ggctgacccaaaatggccctcattt

SEQ ID NO: 3768 - DNA, 25 bp, Homo sapiens
gctgacccaaaatggccctcattta

SEQ ID NO: 3769 - DNA, 25 bp, Homo sapiens
ctgacccaaaatggccctcatttaa

SEQ ID NO: 3770 - DNA, 25 bp, Homo sapiens
tgacccaaaatggccctcatttaaa

SEQ ID NO: 3771 - DNA, 25 bp, Homo sapiens
gacccaaaatggccctcatttaaaa

SEQ ID NO: 3772 - DNA, 25 bp, Homo sapiens
acccaaaatggccctcatttaaaaa

SEQ ID NO: 3773 - DNA, 25 bp, Homo sapiens
cccaaaatggccctcatttaaaaag

SEQ ID NO: 3774 - DNA, 25 bp, Homo sapiens
ccaaaatggccctcatttaaaaagt

SEQ ID NO: 3775 - DNA, 25 bp, Homo sapiens
caaaatggccctcatttaaaaagtt

SEQ ID NO: 3776 - DNA, 25 bp, Homo sapiens
aaaatggccctcatttaaaaagttc

SEQ ID NO: 3777 - DNA, 25 bp, Homo sapiens
aaatggccctcatttaaaaagttct

SEQ ID NO: 3778 - DNA, 25 bp, Homo sapiens
aatggccctcatttaaaaagttctg

SEQ ID NO: 3779 - DNA, 25 bp, Homo sapiens
atggccctcatttaaaaagttctgc

SEQ ID NO: 3780 - DNA, 25 bp, Homo sapiens
tggccctcatttaaaaagttctgct

SEQ ID NO: 3781 - DNA, 25 bp, Homo sapiens
ggccctcatttaaaaagttctgctg

SEQ ID NO: 3782 - DNA, 25 bp, Homo sapiens
gccctcatttaaaaagttctgctgt

SEQ ID NO: 3783 - DNA, 25 bp, Homo sapiens
ccctcatttaaaaagttctgctgtt

SEQ ID NO: 3784 - DNA, 25 bp, Homo sapiens
cctcatttaaaaagttctgctgttt

SEQ ID NO: 3785 - DNA, 25 bp, Homo sapiens
ctcatttaaaaagttctgctgtttc

SEQ ID NO: 3786 - DNA, 25 bp, Homo sapiens
tcatttaaaaagttctgctgtttcc

SEQ ID NO: 3787 - DNA, 25 bp, Homo sapiens
catttaaaaagttctgctgtttccc

SEQ ID NO: 3788 - DNA, 25 bp, Homo sapiens
atttaaaaagttctgctgtttccca

SEQ ID NO: 3789 - DNA, 25 bp, Homo sapiens
tttaaaaagttctgctgtttcccat

SEQ ID NO: 3790 - DNA, 25 bp, Homo sapiens
ttaaaaagttctgctgtttcccatt

SEQ ID NO: 3791 - DNA, 25 bp, Homo sapiens
taaaaagttctgctgtttcccattt

SEQ ID NO: 3792 - DNA, 25 bp, Homo sapiens
aaaaagttctgctgtttcccatttg

SEQ ID NO: 3793 - DNA, 25 bp, Homo sapiens
aaaagttctgctgtttcccatttgg

SEQ ID NO: 3794 - DNA, 25 bp, Homo sapiens
aaagttctgctgtttcccatttggt

SEQ ID NO: 3795 - DNA, 25 bp, Homo sapiens
aagttctgctgtttcccatttggtt

SEQ ID NO: 3796 - DNA, 25 bp, Homo sapiens
agttctgctgtttcccatttggttc

SEQ ID NO: 3797 - DNA, 25 bp, Homo sapiens
gttctgctgtttcccatttggttct

SEQ ID NO: 3798 - DNA, 25 bp, Homo sapiens
ttctgctgtttcccatttggttctg

SEQ ID NO: 3799 - DNA, 25 bp, Homo sapiens
tctgctgtttcccatttggttctgt

SEQ ID NO: 3800 - DNA, 25 bp, Homo sapiens
ctgctgtttcccatttggttctgtc

SEQ ID NO: 3801 - DNA, 25 bp, Homo sapiens
tgctgtttcccatttggttctgtcc

SEQ ID NO: 3802 - DNA, 25 bp, Homo sapiens
gctgtttcccatttggttctgtccc

SEQ ID NO: 3803 - DNA, 25 bp, Homo sapiens
ctgtttcccatttggttctgtccca

SEQ ID NO: 3804 - DNA, 25 bp, Homo sapiens
tgtttcccatttggttctgtcccag

SEQ ID NO: 3805 - DNA, 25 bp, Homo sapiens
gtttcccatttggttctgtcccaga

SEQ ID NO: 3806 - DNA, 25 bp, Homo sapiens
tttcccatttggttctgtcccagat

SEQ ID NO: 3807 - DNA, 25 bp, Homo sapiens
ttcccatttggttctgtcccagatg

SEQ ID NO: 3808 - DNA, 25 bp, Homo sapiens
tcccatttggttctgtcccagatga

SEQ ID NO: 3809 - DNA, 25 bp, Homo sapiens
cccatttggttctgtcccagatgaa

SEQ ID NO: 3810 - DNA, 25 bp, Homo sapiens
ccatttggttctgtcccagatgaac

SEQ ID NO: 3811 - DNA, 25 bp, Homo sapiens
catttggttctgtcccagatgaaca

SEQ ID NO: 3812 - DNA, 25 bp, Homo sapiens
atttggttctgtcccagatgaacat

SEQ ID NO: 3813 - DNA, 25 bp, Homo sapiens
tttggttctgtcccagatgaacatg

SEQ ID NO: 3814 - DNA, 25 bp, Homo sapiens
ttggttctgtcccagatgaacatgg

SEQ ID NO: 3815 - DNA, 25 bp, Homo sapiens
tggttctgtcccagatgaacatgga

SEQ ID NO: 3816 - DNA, 25 bp, Homo sapiens
ggttctgtcccagatgaacatggaa

SEQ ID NO: 3817 - DNA, 25 bp, Homo sapiens
gttctgtcccagatgaacatggaac

SEQ ID NO: 3818 - DNA, 25 bp, Homo sapiens
ttctgtcccagatgaacatggaact

SEQ ID NO: 3819 - DNA, 25 bp, Homo sapiens
tctgtcccagatgaacatggaactg

SEQ ID NO: 3820 - DNA, 25 bp, Homo sapiens
ctgtcccagatgaacatggaactga

SEQ ID NO: 3821 - DNA, 25 bp, Homo sapiens
tgtcccagatgaacatggaactgat

SEQ ID NO: 3822 - DNA, 25 bp, Homo sapiens
gtcccagatgaacatggaactgata

SEQ ID NO: 3823 - DNA, 25 bp, Homo sapiens
tcccagatgaacatggaactgatat

SEQ ID NO: 3824 - DNA, 25 bp, Homo sapiens
cccagatgaacatggaactgatatc

SEQ ID NO: 3825 - DNA, 25 bp, Homo sapiens
ccagatgaacatggaactgatatcc

SEQ ID NO: 3826 - DNA, 25 bp, Homo sapiens
cagatgaacatggaactgatatcca

SEQ ID NO: 3827 - DNA, 25 bp, Homo sapiens
agatgaacatggaactgatatccat

SEQ ID NO: 3828 - DNA, 25 bp, Homo sapiens
gatgaacatggaactgatatccatc

SEQ ID NO: 3829 - DNA, 25 bp, Homo sapiens
atgaacatggaactgatatccatcc

SEQ ID NO: 3830 - DNA, 25 bp, Homo sapiens
tgaacatggaactgatatccatcca

SEQ ID NO: 3831 - DNA, 25 bp, Homo sapiens
gaacatggaactgatatccatccaa

SEQ ID NO: 3832 - DNA, 25 bp, Homo sapiens
aacatggaactgatatccatccaat

SEQ ID NO: 3833 - DNA, 25 bp, Homo sapiens
acatggaactgatatccatccaatg

SEQ ID NO: 3834 - DNA, 25 bp, Homo sapiens
catggaactgatatccatccaatga

SEQ ID NO: 3835 - DNA, 25 bp, Homo sapiens
atggaactgatatccatccaatgag

SEQ ID NO: 3836 - DNA, 25 bp, Homo sapiens
tggaactgatatccatccaatgagt

SEQ ID NO: 3837 - DNA, 25 bp, Homo sapiens
ggaactgatatccatccaatgagtt

SEQ ID NO: 3838 - DNA, 25 bp, Homo sapiens
gaactgatatccatccaatgagttt

SEQ ID NO: 3839 - DNA, 25 bp, Homo sapiens
aactgatatccatccaatgagtttg

SEQ ID NO: 3840 - DNA, 25 bp, Homo sapiens
actgatatccatccaatgagtttgt

SEQ ID NO: 3841 - DNA, 25 bp, Homo sapiens
ctgatatccatccaatgagtttgtt

SEQ ID NO: 3842 - DNA, 25 bp, Homo sapiens
tgatatccatccaatgagtttgttt

SEQ ID NO: 3843 - DNA, 25 bp, Homo sapiens
gatatccatccaatgagtttgtttt

SEQ ID NO: 3844 - DNA, 25 bp, Homo sapiens
atatccatccaatgagtttgttttt

SEQ ID NO: 3845 - DNA, 25 bp, Homo sapiens
tatccatccaatgagtttgtttttt

SEQ ID NO: 3846 - DNA, 25 bp, Homo sapiens
atccatccaatgagtttgtttttta

SEQ ID NO: 3847 - DNA, 25 bp, Homo sapiens
tccatccaatgagtttgttttttag

SEQ ID NO: 3848 - DNA, 25 bp, Homo sapiens
ccatccaatgagtttgttttttaga

SEQ ID NO: 3849 - DNA, 25 bp, Homo sapiens
catccaatgagtttgttttttagag

SEQ ID NO: 3850 - DNA, 25 bp, Homo sapiens
atccaatgagtttgttttttagaga

SEQ ID NO: 3851 - DNA, 25 bp, Homo sapiens
tccaatgagtttgttttttagagac

SEQ ID NO: 3852 - DNA, 25 bp, Homo sapiens
ccaatgagtttgttttttagagact

SEQ ID NO: 3853 - DNA, 25 bp, Homo sapiens
caatgagtttgttttttagagacta

SEQ ID NO: 3854 - DNA, 25 bp, Homo sapiens
aatgagtttgttttttagagactat

SEQ ID NO: 3855 - DNA, 25 bp, Homo sapiens
atgagtttgttttttagagactatt

SEQ ID NO: 3856 - DNA, 25 bp, Homo sapiens
tgagtttgttttttagagactattt

SEQ ID NO: 3857 - DNA, 25 bp, Homo sapiens
gagtttgttttttagagactatttt

SEQ ID NO: 3858 - DNA, 25 bp, Homo sapiens
agtttgttttttagagactattttg

SEQ ID NO: 3859 - DNA, 25 bp, Homo sapiens
gtttgttttttagagactattttgg

SEQ ID NO: 3860 - DNA, 25 bp, Homo sapiens
tttgttttttagagactattttggc

SEQ ID NO: 3861 - DNA, 25 bp, Homo sapiens
ttgttttttagagactattttggcc

SEQ ID NO: 3862 - DNA, 25 bp, Homo sapiens
tgttttttagagactattttggccc

SEQ ID NO: 3863 - DNA, 25 bp, Homo sapiens
gttttttagagactattttggcccc

SEQ ID NO: 3864 - DNA, 25 bp, Homo sapiens
ttttttagagactattttggcccct

SEQ ID NO: 3865 - DNA, 25 bp, Homo sapiens
tttttagagactattttggcccctt

SEQ ID NO: 3866 - DNA, 25 bp, Homo sapiens
ttttagagactattttggccccttt

SEQ ID NO: 3867 - DNA, 25 bp, Homo sapiens
tttagagactattttggcccctttc

SEQ ID NO: 3868 - DNA, 25 bp, Homo sapiens
ttagagactattttggcccctttct

SEQ ID NO: 3869 - DNA, 25 bp, Homo sapiens
tagagactattttggcccctttctc

SEQ ID NO: 3870 - DNA, 25 bp, Homo sapiens
agagactattttggcccctttctca

SEQ ID NO: 3871 - DNA, 25 bp, Homo sapiens
gagactattttggcccctttctcac

SEQ ID NO: 3872 - DNA, 25 bp, Homo sapiens
agactattttggcccctttctcaca

SEQ ID NO: 3873 - DNA, 25 bp, Homo sapiens
gactattttggcccctttctcacaa

SEQ ID NO: 3874 - DNA, 25 bp, Homo sapiens
actattttggcccctttctcacaag

SEQ ID NO: 3875 - DNA, 25 bp, Homo sapiens
ctattttggcccctttctcacaagg

SEQ ID NO: 3876 - DNA, 25 bp, Homo sapiens
tattttggcccctttctcacaagga

SEQ ID NO: 3877 - DNA, 25 bp, Homo sapiens
attttggcccctttctcacaaggag

SEQ ID NO: 3878 - DNA, 25 bp, Homo sapiens
ttttggcccctttctcacaaggagt

SEQ ID NO: 3879 - DNA, 25 bp, Homo sapiens
tttggcccctttctcacaaggagtg

SEQ ID NO: 3880 - DNA, 25 bp, Homo sapiens
ttggcccctttctcacaaggagtga

SEQ ID NO: 3881 - DNA, 25 bp, Homo sapiens
tggcccctttctcacaaggagtgag

SEQ ID NO: 3882 - DNA, 25 bp, Homo sapiens
ggcccctttctcacaaggagtgagt

SEQ ID NO: 3883 - DNA, 25 bp, Homo sapiens
gcccctttctcacaaggagtgagtc

SEQ ID NO: 3884 - DNA, 25 bp, Homo sapiens
cccctttctcacaaggagtgagtcc

SEQ ID NO: 3885 - DNA, 25 bp, Homo sapiens
ccctttctcacaaggagtgagtcca

SEQ ID NO: 3886 - DNA, 25 bp, Homo sapiens
cctttctcacaaggagtgagtccaa

SEQ ID NO: 3887 - DNA, 25 bp, Homo sapiens
ctttctcacaaggagtgagtccaag

SEQ ID NO: 3888 - DNA, 25 bp, Homo sapiens
tttctcacaaggagtgagtccaagt

SEQ ID NO: 3889 - DNA, 25 bp, Homo sapiens
ttctcacaaggagtgagtccaagta

SEQ ID NO: 3890 - DNA, 25 bp, Homo sapiens
tctcacaaggagtgagtccaagtat

SEQ ID NO: 3891 - DNA, 25 bp, Homo sapiens
ctcacaaggagtgagtccaagtatt

SEQ ID NO: 3892 - DNA, 25 bp, Homo sapiens
tcacaaggagtgagtccaagtattt

SEQ ID NO: 3893 - DNA, 25 bp, Homo sapiens
cacaaggagtgagtccaagtatttt

SEQ ID NO: 3894 - DNA, 25 bp, Homo sapiens
acaaggagtgagtccaagtattttg

SEQ ID NO: 3895 - DNA, 25 bp, Homo sapiens
caaggagtgagtccaagtattttgt

SEQ ID NO: 3896 - DNA, 25 bp, Homo sapiens
aaggagtgagtccaagtattttgta

SEQ ID NO: 3897 - DNA, 25 bp, Homo sapiens
aggagtgagtccaagtattttgtag

SEQ ID NO: 3898 - DNA, 25 bp, Homo sapiens
ggagtgagtccaagtattttgtagt

SEQ ID NO: 3899 - DNA, 25 bp, Homo sapiens
gagtgagtccaagtattttgtagtc

SEQ ID NO: 3900 - DNA, 25 bp, Homo sapiens
agtgagtccaagtattttgtagtct

SEQ ID NO: 3901 - DNA, 25 bp, Homo sapiens
gtgagtccaagtattttgtagtctt

SEQ ID NO: 3902 - DNA, 25 bp, Homo sapiens
tgagtccaagtattttgtagtcttt

SEQ ID NO: 3903 - DNA, 25 bp, Homo sapiens
gagtccaagtattttgtagtcttta

SEQ ID NO: 3904 - DNA, 25 bp, Homo sapiens
agtccaagtattttgtagtctttat

SEQ ID NO: 3905 - DNA, 25 bp, Homo sapiens
gtccaagtattttgtagtctttata

SEQ ID NO: 3906 - DNA, 25 bp, Homo sapiens
tccaagtattttgtagtctttatat

SEQ ID NO: 3907 - DNA, 25 bp, Homo sapiens
ccaagtattttgtagtctttatata

SEQ ID NO: 3908 - DNA, 25 bp, Homo sapiens
caagtattttgtagtctttatatat

SEQ ID NO: 3909 - DNA, 25 bp, Homo sapiens
aagtattttgtagtctttatatatg

SEQ ID NO: 3910 - DNA, 25 bp, Homo sapiens
agtattttgtagtctttatatatgt

SEQ ID NO: 3911 - DNA, 25 bp, Homo sapiens
gtattttgtagtctttatatatgtt

SEQ ID NO: 3912 - DNA, 25 bp, Homo sapiens
tattttgtagtctttatatatgttt

SEQ ID NO: 3913 - DNA, 25 bp, Homo sapiens
attttgtagtctttatatatgtttt

SEQ ID NO: 3914 - DNA, 25 bp, Homo sapiens
ttttgtagtctttatatatgttttg

SEQ ID NO: 3915 - DNA, 25 bp, Homo sapiens
tttgtagtctttatatatgttttgt

SEQ ID NO: 3916 - DNA, 25 bp, Homo sapiens
ttgtagtctttatatatgttttgta

SEQ ID NO: 3917 - DNA, 25 bp, Homo sapiens
tgtagtctttatatatgttttgtac

SEQ ID NO: 3918 - DNA, 25 bp, Homo sapiens
gtagtctttatatatgttttgtaca

SEQ ID NO: 3919 - DNA, 25 bp, Homo sapiens
tagtctttatatatgttttgtacat

SEQ ID NO: 3920 - DNA, 25 bp, Homo sapiens
agtctttatatatgttttgtacatc

SEQ ID NO: 3921 - DNA, 25 bp, Homo sapiens
gtctttatatatgttttgtacatca

SEQ ID NO: 3922 - DNA, 25 bp, Homo sapiens
tctttatatatgttttgtacatcat

SEQ ID NO: 3923 - DNA, 25 bp, Homo sapiens
ctttatatatgttttgtacatcata

SEQ ID NO: 3924 - DNA, 25 bp, Homo sapiens
tttatatatgttttgtacatcataa

SEQ ID NO: 3925 - DNA, 25 bp, Homo sapiens
ttatatatgttttgtacatcataag

SEQ ID NO: 3926 - DNA, 25 bp, Homo sapiens
tatatatgttttgtacatcataagc

SEQ ID NO: 3927 - DNA, 25 bp, Homo sapiens
atatatgttttgtacatcataagca

SEQ ID NO: 3928 - DNA, 25 bp, Homo sapiens
tatatgttttgtacatcataagcag

SEQ ID NO: 3929 - DNA, 25 bp, Homo sapiens
atatgttttgtacatcataagcagt

SEQ ID NO: 3930 - DNA, 25 bp, Homo sapiens
tatgttttgtacatcataagcagta

SEQ ID NO: 3931 - DNA, 25 bp, Homo sapiens
atgttttgtacatcataagcagtat

SEQ ID NO: 3932 - DNA, 25 bp, Homo sapiens
tgttttgtacatcataagcagtata

SEQ ID NO: 3933 - DNA, 25 bp, Homo sapiens
gttttgtacatcataagcagtatat

SEQ ID NO: 3934 - DNA, 25 bp, Homo sapiens
ttttgtacatcataagcagtatata

SEQ ID NO: 3935 - DNA, 25 bp, Homo sapiens
tttgtacatcataagcagtatatat

SEQ ID NO: 3936 - DNA, 25 bp, Homo sapiens
ttgtacatcataagcagtatatatg

SEQ ID NO: 3937 - DNA, 25 bp, Homo sapiens
tgtacatcataagcagtatatatgg

SEQ ID NO: 3938 - DNA, 25 bp, Homo sapiens
gtacatcataagcagtatatatggg

SEQ ID NO: 3939 - DNA, 25 bp, Homo sapiens
tacatcataagcagtatatatgggt

SEQ ID NO: 3940 - DNA, 25 bp, Homo sapiens
acatcataagcagtatatatgggtg

SEQ ID NO: 3941 - DNA, 25 bp, Homo sapiens
catcataagcagtatatatgggtgt

SEQ ID NO: 3942 - DNA, 25 bp, Homo sapiens
atcataagcagtatatatgggtgtt

SEQ ID NO: 3943 - DNA, 25 bp, Homo sapiens
tcataagcagtatatatgggtgttt

SEQ ID NO: 3944 - DNA, 25 bp, Homo sapiens
cataagcagtatatatgggtgtttc

SEQ ID NO: 3945 - DNA, 25 bp, Homo sapiens
ataagcagtatatatgggtgtttcc

SEQ ID NO: 3946 - DNA, 25 bp, Homo sapiens
taagcagtatatatgggtgtttcca

SEQ ID NO: 3947 - DNA, 25 bp, Homo sapiens
aagcagtatatatgggtgtttccat

SEQ ID NO: 3948 - DNA, 25 bp, Homo sapiens
agcagtatatatgggtgtttccatg

SEQ ID NO: 3949 - DNA, 25 bp, Homo sapiens
gcagtatatatgggtgtttccatgt

SEQ ID NO: 3950 - DNA, 25 bp, Homo sapiens
cagtatatatgggtgtttccatgtg

SEQ ID NO: 3951 - DNA, 25 bp, Homo sapiens
agtatatatgggtgtttccatgtgc

SEQ ID NO: 3952 - DNA, 25 bp, Homo sapiens
gtatatatgggtgtttccatgtgca

SEQ ID NO: 3953 - DNA, 25 bp, Homo sapiens
tatatatgggtgtttccatgtgcag

SEQ ID NO: 3954 - DNA, 25 bp, Homo sapiens
atatatgggtgtttccatgtgcagg

SEQ ID NO: 3955 - DNA, 25 bp, Homo sapiens
tatatgggtgtttccatgtgcagga

SEQ ID NO: 3956 - DNA, 25 bp, Homo sapiens
atatgggtgtttccatgtgcaggaa

SEQ ID NO: 3957 - DNA, 25 bp, Homo sapiens
tatgggtgtttccatgtgcaggaag

SEQ ID NO: 3958 - DNA, 25 bp, Homo sapiens
atgggtgtttccatgtgcaggaagg

SEQ ID NO: 3959 - DNA, 25 bp, Homo sapiens
tgggtgtttccatgtgcaggaaggt

SEQ ID NO: 3960 - DNA, 25 bp, Homo sapiens
gggtgtttccatgtgcaggaaggtt

SEQ ID NO: 3961 - DNA, 25 bp, Homo sapiens
ggtgtttccatgtgcaggaaggttt

SEQ ID NO: 3962 - DNA, 25 bp, Homo sapiens
gtgtttccatgtgcaggaaggttta

SEQ ID NO: 3963 - DNA, 25 bp, Homo sapiens
tgtttccatgtgcaggaaggtttag

SEQ ID NO: 3964 - DNA, 25 bp, Homo sapiens
gtttccatgtgcaggaaggtttaga

SEQ ID NO: 3965 - DNA, 25 bp, Homo sapiens
tttccatgtgcaggaaggtttagac

SEQ ID NO: 3966 - DNA, 25 bp, Homo sapiens
ttccatgtgcaggaaggtttagacc

SEQ ID NO: 3967 - DNA, 25 bp, Homo sapiens
tccatgtgcaggaaggtttagacct

SEQ ID NO: 3968 - DNA, 25 bp, Homo sapiens
ccatgtgcaggaaggtttagacctt

SEQ ID NO: 3969 - DNA, 25 bp, Homo sapiens
catgtgcaggaaggtttagaccttc

SEQ ID NO: 3970 - DNA, 25 bp, Homo sapiens
atgtgcaggaaggtttagaccttcg

SEQ ID NO: 3971 - DNA, 25 bp, Homo sapiens
tgtgcaggaaggtttagaccttcga

SEQ ID NO: 3972 - DNA, 25 bp, Homo sapiens
gtgcaggaaggtttagaccttcgaa

SEQ ID NO: 3973 - DNA, 25 bp, Homo sapiens
tgcaggaaggtttagaccttcgaaa

SEQ ID NO: 3974 - DNA, 25 bp, Homo sapiens
gcaggaaggtttagaccttcgaaat

SEQ ID NO: 3975 - DNA, 25 bp, Homo sapiens
caggaaggtttagaccttcgaaatc

SEQ ID NO: 3976 - DNA, 25 bp, Homo sapiens
aggaaggtttagaccttcgaaatct

SEQ ID NO: 3977 - DNA, 25 bp, Homo sapiens
ggaaggtttagaccttcgaaatctg

SEQ ID NO: 3978 - DNA, 25 bp, Homo sapiens
gaaggtttagaccttcgaaatctgg

SEQ ID NO: 3979 - DNA, 25 bp, Homo sapiens
aaggtttagaccttcgaaatctggc

SEQ ID NO: 3980 - DNA, 25 bp, Homo sapiens
aggtttagaccttcgaaatctggca

SEQ ID NO: 3981 - DNA, 25 bp, Homo sapiens
ggtttagaccttcgaaatctggcaa

SEQ ID NO: 3982 - DNA, 25 bp, Homo sapiens
gtttagaccttcgaaatctggcaag

SEQ ID NO: 3983 - DNA, 25 bp, Homo sapiens
tttagaccttcgaaatctggcaagt

SEQ ID NO: 3984 - DNA, 25 bp, Homo sapiens
ttagaccttcgaaatctggcaagtg

SEQ ID NO: 3985 - DNA, 25 bp, Homo sapiens
tagaccttcgaaatctggcaagtga

SEQ ID NO: 3986 - DNA, 25 bp, Homo sapiens
agaccttcgaaatctggcaagtgac

SEQ ID NO: 3987 - DNA, 25 bp, Homo sapiens
gaccttcgaaatctggcaagtgacg

SEQ ID NO: 3988 - DNA, 25 bp, Homo sapiens
accttcgaaatctggcaagtgacga

SEQ ID NO: 3989 - DNA, 25 bp, Homo sapiens
ccttcgaaatctggcaagtgacgat

SEQ ID NO: 3990 - DNA, 25 bp, Homo sapiens
cttcgaaatctggcaagtgacgatt

SEQ ID NO: 3991 - DNA, 25 bp, Homo sapiens
ttcgaaatctggcaagtgacgattc

SEQ ID NO: 3992 - DNA, 25 bp, Homo sapiens
tcgaaatctggcaagtgacgattcc

SEQ ID NO: 3993 - DNA, 25 bp, Homo sapiens
cgaaatctggcaagtgacgattcct

SEQ ID NO: 3994 - DNA, 25 bp, Homo sapiens
gaaatctggcaagtgacgattccta

SEQ ID NO: 3995 - DNA, 25 bp, Homo sapiens
aaatctggcaagtgacgattcctac

SEQ ID NO: 3996 - DNA, 25 bp, Homo sapiens
aatctggcaagtgacgattcctaca

SEQ ID NO: 3997 - DNA, 25 bp, Homo sapiens
atctggcaagtgacgattcctacat

SEQ ID NO: 3998 - DNA, 25 bp, Homo sapiens
tctggcaagtgacgattcctacatc

SEQ ID NO: 3999 - DNA, 25 bp, Homo sapiens
ctggcaagtgacgattcctacatca

SEQ ID NO: 4000 - DNA, 25 bp, Homo sapiens
tggcaagtgacgattcctacatcac

SEQ ID NO: 4001 - DNA, 25 bp, Homo sapiens
ggcaagtgacgattcctacatcaca

SEQ ID NO: 4002 - DNA, 25 bp, Homo sapiens
gcaagtgacgattcctacatcacac

SEQ ID NO: 4003 - DNA, 25 bp, Homo sapiens
caagtgacgattcctacatcacacc

SEQ ID NO: 4004 - DNA, 25 bp, Homo sapiens
aagtgacgattcctacatcacacca

SEQ ID NO: 4005 - DNA, 25 bp, Homo sapiens
agtgacgattcctacatcacaccat

SEQ ID NO: 4006 - DNA, 25 bp, Homo sapiens
gtgacgattcctacatcacaccata

SEQ ID NO: 4007 - DNA, 25 bp, Homo sapiens
tgacgattcctacatcacaccatat

SEQ ID NO: 4008 - DNA, 25 bp, Homo sapiens
gacgattcctacatcacaccatatt

SEQ ID NO: 4009 - DNA, 25 bp, Homo sapiens
acgattcctacatcacaccatattt

SEQ ID NO: 4010 - DNA, 25 bp, Homo sapiens
cgattcctacatcacaccatatttt

SEQ ID NO: 4011 - DNA, 25 bp, Homo sapiens
gattcctacatcacaccatatttta

SEQ ID NO: 4012 - DNA, 25 bp, Homo sapiens
attcctacatcacaccatattttaa

SEQ ID NO: 4013 - DNA, 25 bp, Homo sapiens
ttcctacatcacaccatattttaac

SEQ ID NO: 4014 - DNA, 25 bp, Homo sapiens
tcctacatcacaccatattttaacg

SEQ ID NO: 4015 - DNA, 25 bp, Homo sapiens
cctacatcacaccatattttaacgt

SEQ ID NO: 4016 - DNA, 25 bp, Homo sapiens
ctacatcacaccatattttaacgta

SEQ ID NO: 4017 - DNA, 25 bp, Homo sapiens
tacatcacaccatattttaacgtag

SEQ ID NO: 4018 - DNA, 25 bp, Homo sapiens
acatcacaccatattttaacgtaga

SEQ ID NO: 4019 - DNA, 25 bp, Homo sapiens
catcacaccatattttaacgtagag

SEQ ID NO: 4020 - DNA, 25 bp, Homo sapiens
atcacaccatattttaacgtagagg

SEQ ID NO: 4021 - DNA, 25 bp, Homo sapiens
tcacaccatattttaacgtagagga

SEQ ID NO: 4022 - DNA, 25 bp, Homo sapiens
cacaccatattttaacgtagaggag

SEQ ID NO: 4023 - DNA, 25 bp, Homo sapiens
acaccatattttaacgtagaggaga

SEQ ID NO: 4024 - DNA, 25 bp, Homo sapiens
caccatattttaacgtagaggagaa

SEQ ID NO: 4025 - DNA, 25 bp, Homo sapiens
accatattttaacgtagaggagaat

SEQ ID NO: 4026 - DNA, 17 bp, Homo sapiens
tccatgattaatcttgt

SEQ ID NO: 4027 - DNA, 17 bp, Homo sapiens
ccatgattaatcttgtc

SEQ ID NO: 4028 - DNA, 17 bp, Homo sapiens
catgattaatcttgtca

SEQ ID NO: 4029 - DNA, 17 bp, Homo sapiens
atgattaatcttgtcat

SEQ ID NO: 4030 - DNA, 17 bp, Homo sapiens
tgattaatcttgtcatt

SEQ ID NO: 4031 - DNA, 17 bp, Homo sapiens
gattaatcttgtcattt

SEQ ID NO: 4032 - DNA, 17 bp, Homo sapiens
attaatcttgtcatttg

SEQ ID NO: 4033 - DNA, 17 bp, Homo sapiens
ttaatcttgtcatttgt

SEQ ID NO: 4034 - DNA, 17 bp, Homo sapiens
taatcttgtcatttgta

SEQ ID NO: 4035 - DNA, 17 bp, Homo sapiens
aatcttgtcatttgtac

SEQ ID NO: 4036 - DNA, 17 bp, Homo sapiens
atcttgtcatttgtaca

SEQ ID NO: 4037 - DNA, 17 bp, Homo sapiens
tcttgtcatttgtacag

SEQ ID NO: 4038 - DNA, 17 bp, Homo sapiens
cttgtcatttgtacagg

SEQ ID NO: 4039 - DNA, 17 bp, Homo sapiens
ttgtcatttgtacaggg

SEQ ID NO: 4040 - DNA, 17 bp, Homo sapiens
tgtcatttgtacagggt

SEQ ID NO: 4041 - DNA, 17 bp, Homo sapiens
gtcatttgtacagggtt

SEQ ID NO: 4042 - DNA, 17 bp, Homo sapiens
tcatttgtacagggttt

SEQ ID NO: 4043 - DNA, 17 bp, Homo sapiens
catttgtacagggtttt

SEQ ID NO: 4044 - DNA, 17 bp, Homo sapiens
atttgtacagggttttc

SEQ ID NO: 4045 - DNA, 17 bp, Homo sapiens
tttgtacagggttttct

SEQ ID NO: 4046 - DNA, 17 bp, Homo sapiens
ttgtacagggttttctt

SEQ ID NO: 4047 - DNA, 17 bp, Homo sapiens
tgtacagggttttcttt

SEQ ID NO: 4048 - DNA, 17 bp, Homo sapiens
gtacagggttttctttc

SEQ ID NO: 4049 - DNA, 17 bp, Homo sapiens
tacagggttttctttcg

SEQ ID NO: 4050 - DNA, 17 bp, Homo sapiens
acagggttttctttcga

SEQ ID NO: 4051 - DNA, 17 bp, Homo sapiens
cagggttttctttcgat

SEQ ID NO: 4052 - DNA, 17 bp, Homo sapiens
agggttttctttcgatt

SEQ ID NO: 4053 - DNA, 17 bp, Homo sapiens
gggttttctttcgattt

SEQ ID NO: 4054 - DNA, 17 bp, Homo sapiens
ggttttctttcgatttt

SEQ ID NO: 4055 - DNA, 17 bp, Homo sapiens
gttttctttcgattttt

SEQ ID NO: 4056 - DNA, 17 bp, Homo sapiens
ttttctttcgatttttc

SEQ ID NO: 4057 - DNA, 17 bp, Homo sapiens
tttctttcgatttttct

SEQ ID NO: 4058 - DNA, 17 bp, Homo sapiens
ttctttcgatttttctg

SEQ ID NO: 4059 - DNA, 17 bp, Homo sapiens
tctttcgatttttctgc

SEQ ID NO: 4060 - DNA, 17 bp, Homo sapiens
ctttcgatttttctgca

SEQ ID NO: 4061 - DNA, 17 bp, Homo sapiens
tttcgatttttctgcac

SEQ ID NO: 4062 - DNA, 17 bp, Homo sapiens
ttcgatttttctgcaca

SEQ ID NO: 4063 - DNA, 17 bp, Homo sapiens
tcgatttttctgcacac

SEQ ID NO: 4064 - DNA, 17 bp, Homo sapiens
cgatttttctgcacaca

SEQ ID NO: 4065 - DNA, 17 bp, Homo sapiens
gatttttctgcacacat

SEQ ID NO: 4066 - DNA, 17 bp, Homo sapiens
atttttctgcacacatt

SEQ ID NO: 4067 - DNA, 17 bp, Homo sapiens
tttttctgcacacattt

SEQ ID NO: 4068 - DNA, 17 bp, Homo sapiens
ttttctgcacacatttc

SEQ ID NO: 4069 - DNA, 17 bp, Homo sapiens
tttctgcacacatttcc

SEQ ID NO: 4070 - DNA, 17 bp, Homo sapiens
ttctgcacacatttcct

SEQ ID NO: 4071 - DNA, 17 bp, Homo sapiens
tctgcacacatttccta

SEQ ID NO: 4072 - DNA, 17 bp, Homo sapiens
ctgcacacatttcctat

SEQ ID NO: 4073 - DNA, 17 bp, Homo sapiens
tgcacacatttcctatg

SEQ ID NO: 4074 - DNA, 17 bp, Homo sapiens
gcacacatttcctatgc

SEQ ID NO: 4075 - DNA, 17 bp, Homo sapiens
cacacatttcctatgca

SEQ ID NO: 4076 - DNA, 17 bp, Homo sapiens
acacatttcctatgcat

SEQ ID NO: 4077 - DNA, 17 bp, Homo sapiens
cacatttcctatgcatt

SEQ ID NO: 4078 - DNA, 17 bp, Homo sapiens
acatttcctatgcattt

SEQ ID NO: 4079 - DNA, 17 bp, Homo sapiens
catttcctatgcatttg

SEQ ID NO: 4080 - DNA, 17 bp, Homo sapiens
atttcctatgcatttgt

SEQ ID NO: 4081 - DNA, 17 bp, Homo sapiens
tttcctatgcatttgtt

SEQ ID NO: 4082 - DNA, 17 bp, Homo sapiens
ttcctatgcatttgttt

SEQ ID NO: 4083 - DNA, 17 bp, Homo sapiens
tcctatgcatttgtttc

SEQ ID NO: 4084 - DNA, 17 bp, Homo sapiens
cctatgcatttgtttct

SEQ ID NO: 4085 - DNA, 17 bp, Homo sapiens
ctatgcatttgtttcta

SEQ ID NO: 4086 - DNA, 17 bp, Homo sapiens
tatgcatttgtttctag

SEQ ID NO: 4087 - DNA, 17 bp, Homo sapiens
atgcatttgtttctagt

SEQ ID NO: 4088 - DNA, 17 bp, Homo sapiens
tgcatttgtttctagtt

SEQ ID NO: 4089 - DNA, 17 bp, Homo sapiens
gcatttgtttctagttc

SEQ ID NO: 4090 - DNA, 17 bp, Homo sapiens
catttgtttctagttct

SEQ ID NO: 4091 - DNA, 17 bp, Homo sapiens
atttgtttctagttctc

SEQ ID NO: 4092 - DNA, 17 bp, Homo sapiens
tttgtttctagttctca

SEQ ID NO: 4093 - DNA, 17 bp, Homo sapiens
ttgtttctagttctcaa

SEQ ID NO: 4094 - DNA, 17 bp, Homo sapiens
tgtttctagttctcaac

SEQ ID NO: 4095 - DNA, 17 bp, Homo sapiens
gtttctagttctcaacc

SEQ ID NO: 4096 - DNA, 17 bp, Homo sapiens
tttctagttctcaaccc

SEQ ID NO: 4097 - DNA, 17 bp, Homo sapiens
ttctagttctcaaccct

SEQ ID NO: 4098 - DNA, 17 bp, Homo sapiens
tctagttctcaaccctc

SEQ ID NO: 4099 - DNA, 17 bp, Homo sapiens
ctagttctcaaccctca

SEQ ID NO: 4100 - DNA, 17 bp, Homo sapiens
tagttctcaaccctcag

SEQ ID NO: 4101 - DNA, 17 bp, Homo sapiens
agttctcaaccctcagt

SEQ ID NO: 4102 - DNA, 17 bp, Homo sapiens
gttctcaaccctcagta

SEQ ID NO: 4103 - DNA, 17 bp, Homo sapiens
ttctcaaccctcagtaa

SEQ ID NO: 4104 - DNA, 17 bp, Homo sapiens
tctcaaccctcagtaaa

SEQ ID NO: 4105 - DNA, 17 bp, Homo sapiens
ctcaaccctcagtaaac

SEQ ID NO: 4106 - DNA, 17 bp, Homo sapiens
tcaaccctcagtaaacc

SEQ ID NO: 4107 - DNA, 17 bp, Homo sapiens
caaccctcagtaaacca

SEQ ID NO: 4108 - DNA, 17 bp, Homo sapiens
aaccctcagtaaaccaa

SEQ ID NO: 4109 - DNA, 17 bp, Homo sapiens
accctcagtaaaccaaa

SEQ ID NO: 4110 - DNA, 17 bp, Homo sapiens
ccctcagtaaaccaaaa

SEQ ID NO: 4111 - DNA, 17 bp, Homo sapiens
cctcagtaaaccaaaaa

SEQ ID NO: 4112 - DNA, 17 bp, Homo sapiens
ctcagtaaaccaaaaat

SEQ ID NO: 4113 - DNA, 17 bp, Homo sapiens
tcagtaaaccaaaaatc

SEQ ID NO: 4114 - DNA, 17 bp, Homo sapiens
cagtaaaccaaaaatca

SEQ ID NO: 4115 - DNA, 17 bp, Homo sapiens
agtaaaccaaaaatcag

SEQ ID NO: 4116 - DNA, 17 bp, Homo sapiens
gtaaaccaaaaatcagt

SEQ ID NO: 4117 - DNA, 17 bp, Homo sapiens
taaaccaaaaatcagtt

SEQ ID NO: 4118 - DNA, 17 bp, Homo sapiens
aaaccaaaaatcagttg

SEQ ID NO: 4119 - DNA, 17 bp, Homo sapiens
aaccaaaaatcagttga

SEQ ID NO: 4120 - DNA, 17 bp, Homo sapiens
accaaaaatcagttgag

SEQ ID NO: 4121 - DNA, 17 bp, Homo sapiens
ccaaaaatcagttgagg

SEQ ID NO: 4122 - DNA, 17 bp, Homo sapiens
caaaaatcagttgaggc

SEQ ID NO: 4123 - DNA, 17 bp, Homo sapiens
aaaaatcagttgaggca

SEQ ID NO: 4124 - DNA, 17 bp, Homo sapiens
aaaatcagttgaggcat

SEQ ID NO: 4125 - DNA, 17 bp, Homo sapiens
aaatcagttgaggcatt

SEQ ID NO: 4126 - DNA, 17 bp, Homo sapiens
aatcagttgaggcattg

SEQ ID NO: 4127 - DNA, 17 bp, Homo sapiens
atcagttgaggcattgt

SEQ ID NO: 4128 - DNA, 17 bp, Homo sapiens
tcagttgaggcattgta

SEQ ID NO: 4129 - DNA, 17 bp, Homo sapiens
cagttgaggcattgtat

SEQ ID NO: 4130 - DNA, 17 bp, Homo sapiens
agttgaggcattgtatc

SEQ ID NO: 4131 - DNA, 17 bp, Homo sapiens
gttgaggcattgtatct

SEQ ID NO: 4132 - DNA, 17 bp, Homo sapiens
ttgaggcattgtatctt

SEQ ID NO: 4133 - DNA, 17 bp, Homo sapiens
tgaggcattgtatcttc

SEQ ID NO: 4134 - DNA, 17 bp, Homo sapiens
gaggcattgtatcttct

SEQ ID NO: 4135 - DNA, 17 bp, Homo sapiens
aggcattgtatcttcta

SEQ ID NO: 4136 - DNA, 17 bp, Homo sapiens
ggcattgtatcttctag

SEQ ID NO: 4137 - DNA, 17 bp, Homo sapiens
gcattgtatcttctagg

SEQ ID NO: 4138 - DNA, 17 bp, Homo sapiens
cattgtatcttctaggc

SEQ ID NO: 4139 - DNA, 17 bp, Homo sapiens
attgtatcttctaggct

SEQ ID NO: 4140 - DNA, 17 bp, Homo sapiens
ttgtatcttctaggcta

SEQ ID NO: 4141 - DNA, 17 bp, Homo sapiens
tgtatcttctaggctac

SEQ ID NO: 4142 - DNA, 17 bp, Homo sapiens
gtatcttctaggctacc

SEQ ID NO: 4143 - DNA, 17 bp, Homo sapiens
tatcttctaggctaccc

SEQ ID NO: 4144 - DNA, 17 bp, Homo sapiens
atcttctaggctaccca

SEQ ID NO: 4145 - DNA, 17 bp, Homo sapiens
tcttctaggctacccag

SEQ ID NO: 4146 - DNA, 17 bp, Homo sapiens
cttctaggctacccagt

SEQ ID NO: 4147 - DNA, 17 bp, Homo sapiens
ttctaggctacccagtg

SEQ ID NO: 4148 - DNA, 17 bp, Homo sapiens
tctaggctacccagtgt

SEQ ID NO: 4149 - DNA, 17 bp, Homo sapiens
ctaggctacccagtgtt

SEQ ID NO: 4150 - DNA, 17 bp, Homo sapiens
taggctacccagtgtta

SEQ ID NO: 4151 - DNA, 17 bp, Homo sapiens
aggctacccagtgttac

SEQ ID NO: 4152 - DNA, 17 bp, Homo sapiens
ggctacccagtgttaca

SEQ ID NO: 4153 - DNA, 17 bp, Homo sapiens
gctacccagtgttacaa

SEQ ID NO: 4154 - DNA, 17 bp, Homo sapiens
ctacccagtgttacaaa

SEQ ID NO: 4155 - DNA, 17 bp, Homo sapiens
tacccagtgttacaaag

SEQ ID NO: 4156 - DNA, 17 bp, Homo sapiens
acccagtgttacaaagt

SEQ ID NO: 4157 - DNA, 17 bp, Homo sapiens
cccagtgttacaaagtg

SEQ ID NO: 4158 - DNA, 17 bp, Homo sapiens
ccagtgttacaaagtgc

SEQ ID NO: 4159 - DNA, 17 bp, Homo sapiens
cagtgttacaaagtgca

SEQ ID NO: 4160 - DNA, 17 bp, Homo sapiens
agtgttacaaagtgcaa

SEQ ID NO: 4161 - DNA, 17 bp, Homo sapiens
gtgttacaaagtgcaat

SEQ ID NO: 4162 - DNA, 17 bp, Homo sapiens
tgttacaaagtgcaatt

SEQ ID NO: 4163 - DNA, 17 bp, Homo sapiens
gttacaaagtgcaattt

SEQ ID NO: 4164 - DNA, 17 bp, Homo sapiens
ttacaaagtgcaatttc

SEQ ID NO: 4165 - DNA, 17 bp, Homo sapiens
tacaaagtgcaatttca

SEQ ID NO: 4166 - DNA, 17 bp, Homo sapiens
acaaagtgcaatttcaa

SEQ ID NO: 4167 - DNA, 17 bp, Homo sapiens
caaagtgcaatttcaac

SEQ ID NO: 4168 - DNA, 17 bp, Homo sapiens
aaagtgcaatttcaaca

SEQ ID NO: 4169 - DNA, 17 bp, Homo sapiens
aagtgcaatttcaacaa

SEQ ID NO: 4170 - DNA, 17 bp, Homo sapiens
agtgcaatttcaacaat

SEQ ID NO: 4171 - DNA, 17 bp, Homo sapiens
gtgcaatttcaacaata

SEQ ID NO: 4172 - DNA, 17 bp, Homo sapiens
tgcaatttcaacaataa

SEQ ID NO: 4173 - DNA, 17 bp, Homo sapiens
gcaatttcaacaataat

SEQ ID NO: 4174 - DNA, 17 bp, Homo sapiens
caatttcaacaataata

SEQ ID NO: 4175 - DNA, 17 bp, Homo sapiens
aatttcaacaataatag

SEQ ID NO: 4176 - DNA, 17 bp, Homo sapiens
atttcaacaataatagg

SEQ ID NO: 4177 - DNA, 17 bp, Homo sapiens
tttcaacaataataggg

SEQ ID NO: 4178 - DNA, 17 bp, Homo sapiens
ttcaacaataatagggg

SEQ ID NO: 4179 - DNA, 17 bp, Homo sapiens
tcaacaataataggggt

SEQ ID NO: 4180 - DNA, 17 bp, Homo sapiens
caacaataataggggtg

SEQ ID NO: 4181 - DNA, 17 bp, Homo sapiens
aacaataataggggtgt

SEQ ID NO: 4182 - DNA, 17 bp, Homo sapiens
acaataataggggtgtg

SEQ ID NO: 4183 - DNA, 17 bp, Homo sapiens
caataataggggtgtgt

SEQ ID NO: 4184 - DNA, 17 bp, Homo sapiens
aataataggggtgtgtg

SEQ ID NO: 4185 - DNA, 17 bp, Homo sapiens
ataataggggtgtgtgt

SEQ ID NO: 4186 - DNA, 17 bp, Homo sapiens
taataggggtgtgtgtt

SEQ ID NO: 4187 - DNA, 17 bp, Homo sapiens
aataggggtgtgtgttt

SEQ ID NO: 4188 - DNA, 17 bp, Homo sapiens
ataggggtgtgtgtttt

SEQ ID NO: 4189 - DNA, 17 bp, Homo sapiens
taggggtgtgtgtttta

SEQ ID NO: 4190 - DNA, 17 bp, Homo sapiens
aggggtgtgtgttttag

SEQ ID NO: 4191 - DNA, 17 bp, Homo sapiens
ggggtgtgtgttttagc

SEQ ID NO: 4192 - DNA, 17 bp, Homo sapiens
gggtgtgtgttttagct

SEQ ID NO: 4193 - DNA, 17 bp, Homo sapiens
ggtgtgtgttttagctg

SEQ ID NO: 4194 - DNA, 17 bp, Homo sapiens
gtgtgtgttttagctgc

SEQ ID NO: 4195 - DNA, 17 bp, Homo sapiens
tgtgtgttttagctgca

SEQ ID NO: 4196 - DNA, 17 bp, Homo sapiens
gtgtgttttagctgcag

SEQ ID NO: 4197 - DNA, 17 bp, Homo sapiens
tgtgttttagctgcagc

SEQ ID NO: 4198 - DNA, 17 bp, Homo sapiens
gtgttttagctgcagcg

SEQ ID NO: 4199 - DNA, 17 bp, Homo sapiens
tgttttagctgcagcga

SEQ ID NO: 4200 - DNA, 17 bp, Homo sapiens
gttttagctgcagcgaa

SEQ ID NO: 4201 - DNA, 17 bp, Homo sapiens
ttttagctgcagcgaaa

SEQ ID NO: 4202 - DNA, 17 bp, Homo sapiens
tttagctgcagcgaaag

SEQ ID NO: 4203 - DNA, 17 bp, Homo sapiens
ttagctgcagcgaaagc

SEQ ID NO: 4204 - DNA, 17 bp, Homo sapiens
tagctgcagcgaaagca

SEQ ID NO: 4205 - DNA, 17 bp, Homo sapiens
agctgcagcgaaagcat

SEQ ID NO: 4206 - DNA, 17 bp, Homo sapiens
gctgcagcgaaagcata

SEQ ID NO: 4207 - DNA, 17 bp, Homo sapiens
ctgcagcgaaagcatac

SEQ ID NO: 4208 - DNA, 17 bp, Homo sapiens
tgcagcgaaagcataca

SEQ ID NO: 4209 - DNA, 17 bp, Homo sapiens
gcagcgaaagcatacat

SEQ ID NO: 4210 - DNA, 17 bp, Homo sapiens
cagcgaaagcatacatc

SEQ ID NO: 4211 - DNA, 17 bp, Homo sapiens
agcgaaagcatacatct

SEQ ID NO: 4212 - DNA, 17 bp, Homo sapiens
gcgaaagcatacatctt

SEQ ID NO: 4213 - DNA, 17 bp, Homo sapiens
cgaaagcatacatcttc

SEQ ID NO: 4214 - DNA, 17 bp, Homo sapiens
gaaagcatacatcttca

SEQ ID NO: 4215 - DNA, 17 bp, Homo sapiens
aaagcatacatcttcag

SEQ ID NO: 4216 - DNA, 17 bp, Homo sapiens
aagcatacatcttcaga

SEQ ID NO: 4217 - DNA, 17 bp, Homo sapiens
agcatacatcttcagaa

SEQ ID NO: 4218 - DNA, 17 bp, Homo sapiens
gcatacatcttcagaac

SEQ ID NO: 4219 - DNA, 17 bp, Homo sapiens
catacatcttcagaaca

SEQ ID NO: 4220 - DNA, 17 bp, Homo sapiens
atacatcttcagaacat

SEQ ID NO: 4221 - DNA, 17 bp, Homo sapiens
tacatcttcagaacatt

SEQ ID NO: 4222 - DNA, 17 bp, Homo sapiens
acatcttcagaacattt

SEQ ID NO: 4223 - DNA, 17 bp, Homo sapiens
catcttcagaacatttt

SEQ ID NO: 4224 - DNA, 17 bp, Homo sapiens
atcttcagaacattttt

SEQ ID NO: 4225 - DNA, 17 bp, Homo sapiens
tcttcagaacatttttt

SEQ ID NO: 4226 - DNA, 17 bp, Homo sapiens
cttcagaacatttttta

SEQ ID NO: 4227 - DNA, 17 bp, Homo sapiens
ttcagaacattttttaa

SEQ ID NO: 4228 - DNA, 17 bp, Homo sapiens
tcagaacattttttaag

SEQ ID NO: 4229 - DNA, 17 bp, Homo sapiens
cagaacattttttaaga

SEQ ID NO: 4230 - DNA, 17 bp, Homo sapiens
agaacattttttaagat

SEQ ID NO: 4231 - DNA, 17 bp, Homo sapiens
gaacattttttaagatt

SEQ ID NO: 4232 - DNA, 17 bp, Homo sapiens
aacattttttaagatta

SEQ ID NO: 4233 - DNA, 17 bp, Homo sapiens
acattttttaagattat

SEQ ID NO: 4234 - DNA, 17 bp, Homo sapiens
cattttttaagattatg

SEQ ID NO: 4235 - DNA, 17 bp, Homo sapiens
attttttaagattatgt

SEQ ID NO: 4236 - DNA, 17 bp, Homo sapiens
ttttttaagattatgtt

SEQ ID NO: 4237 - DNA, 17 bp, Homo sapiens
tttttaagattatgttt

SEQ ID NO: 4238 - DNA, 17 bp, Homo sapiens
ttttaagattatgtttc

SEQ ID NO: 4239 - DNA, 17 bp, Homo sapiens
tttaagattatgtttct

SEQ ID NO: 4240 - DNA, 17 bp, Homo sapiens
ttaagattatgtttctt

SEQ ID NO: 4241 - DNA, 17 bp, Homo sapiens
taagattatgtttcttg

SEQ ID NO: 4242 - DNA, 17 bp, Homo sapiens
aagattatgtttcttgt

SEQ ID NO: 4243 - DNA, 17 bp, Homo sapiens
agattatgtttcttgtt

SEQ ID NO: 4244 - DNA, 17 bp, Homo sapiens
gattatgtttcttgtta

SEQ ID NO: 4245 - DNA, 17 bp, Homo sapiens
attatgtttcttgttat

SEQ ID NO: 4246 - DNA, 17 bp, Homo sapiens
ttatgtttcttgttatg

SEQ ID NO: 4247 - DNA, 17 bp, Homo sapiens
tatgtttcttgttatga

SEQ ID NO: 4248 - DNA, 17 bp, Homo sapiens
atgtttcttgttatgat

SEQ ID NO: 4249 - DNA, 17 bp, Homo sapiens
tgtttcttgttatgata

SEQ ID NO: 4250 - DNA, 17 bp, Homo sapiens
gtttcttgttatgatat

SEQ ID NO: 4251 - DNA, 17 bp, Homo sapiens
tttcttgttatgatatt

SEQ ID NO: 4252 - DNA, 17 bp, Homo sapiens
ttcttgttatgatattt

SEQ ID NO: 4253 - DNA, 17 bp, Homo sapiens
tcttgttatgatatttg

SEQ ID NO: 4254 - DNA, 17 bp, Homo sapiens
cttgttatgatatttgg

SEQ ID NO: 4255 - DNA, 17 bp, Homo sapiens
ttgttatgatatttggg

SEQ ID NO: 4256 - DNA, 17 bp, Homo sapiens
tgttatgatatttgggg

SEQ ID NO: 4257 - DNA, 17 bp, Homo sapiens
gttatgatatttggggc

SEQ ID NO: 4258 - DNA, 17 bp, Homo sapiens
ttatgatatttggggca

SEQ ID NO: 4259 - DNA, 17 bp, Homo sapiens
tatgatatttggggcag

SEQ ID NO: 4260 - DNA, 17 bp, Homo sapiens
atgatatttggggcagc

SEQ ID NO: 4261 - DNA, 17 bp, Homo sapiens
tgatatttggggcagct

SEQ ID NO: 4262 - DNA, 17 bp, Homo sapiens
gatatttggggcagctc

SEQ ID NO: 4263 - DNA, 17 bp, Homo sapiens
atatttggggcagctca

SEQ ID NO: 4264 - DNA, 17 bp, Homo sapiens
tatttggggcagctcat

SEQ ID NO: 4265 - DNA, 17 bp, Homo sapiens
atttggggcagctcatg

SEQ ID NO: 4266 - DNA, 17 bp, Homo sapiens
tttggggcagctcatgg

SEQ ID NO: 4267 - DNA, 17 bp, Homo sapiens
ttggggcagctcatggc

SEQ ID NO: 4268 - DNA, 17 bp, Homo sapiens
tggggcagctcatggcc

SEQ ID NO: 4269 - DNA, 17 bp, Homo sapiens
ggggcagctcatggcct

SEQ ID NO: 4270 - DNA, 17 bp, Homo sapiens
gggcagctcatggccta

SEQ ID NO: 4271 - DNA, 17 bp, Homo sapiens
ggcagctcatggcctaa

SEQ ID NO: 4272 - DNA, 17 bp, Homo sapiens
gcagctcatggcctaat

SEQ ID NO: 4273 - DNA, 17 bp, Homo sapiens
cagctcatggcctaatt

SEQ ID NO: 4274 - DNA, 17 bp, Homo sapiens
agctcatggcctaattt

SEQ ID NO: 4275 - DNA, 17 bp, Homo sapiens
gctcatggcctaatttt

SEQ ID NO: 4276 - DNA, 17 bp, Homo sapiens
ctcatggcctaattttt

SEQ ID NO: 4277 - DNA, 17 bp, Homo sapiens
tcatggcctaattttta

SEQ ID NO: 4278 - DNA, 17 bp, Homo sapiens
catggcctaatttttat

SEQ ID NO: 4279 - DNA, 17 bp, Homo sapiens
atggcctaatttttatt

SEQ ID NO: 4280 - DNA, 17 bp, Homo sapiens
tggcctaatttttattc

SEQ ID NO: 4281 - DNA, 17 bp, Homo sapiens
ggcctaatttttattcc

SEQ ID NO: 4282 - DNA, 17 bp, Homo sapiens
gcctaatttttattcca

SEQ ID NO: 4283 - DNA, 17 bp, Homo sapiens
cctaatttttattccag

SEQ ID NO: 4284 - DNA, 17 bp, Homo sapiens
ctaatttttattccagt

SEQ ID NO: 4285 - DNA, 17 bp, Homo sapiens
taatttttattccagta

SEQ ID NO: 4286 - DNA, 17 bp, Homo sapiens
aatttttattccagtat

SEQ ID NO: 4287 - DNA, 17 bp, Homo sapiens
atttttattccagtatt

SEQ ID NO: 4288 - DNA, 17 bp, Homo sapiens
tttttattccagtattc

SEQ ID NO: 4289 - DNA, 17 bp, Homo sapiens
ttttattccagtattct

SEQ ID NO: 4290 - DNA, 17 bp, Homo sapiens
tttattccagtattctt

SEQ ID NO: 4291 - DNA, 17 bp, Homo sapiens
ttattccagtattctta

SEQ ID NO: 4292 - DNA, 17 bp, Homo sapiens
tattccagtattcttaa

SEQ ID NO: 4293 - DNA, 17 bp, Homo sapiens
attccagtattcttaac

SEQ ID NO: 4294 - DNA, 17 bp, Homo sapiens
ttccagtattcttaacc

SEQ ID NO: 4295 - DNA, 17 bp, Homo sapiens
tccagtattcttaacct

SEQ ID NO: 4296 - DNA, 17 bp, Homo sapiens
ccagtattcttaacctt

SEQ ID NO: 4297 - DNA, 17 bp, Homo sapiens
cagtattcttaaccttt

SEQ ID NO: 4298 - DNA, 17 bp, Homo sapiens
agtattcttaacctttt

SEQ ID NO: 4299 - DNA, 17 bp, Homo sapiens
gtattcttaaccttttt

SEQ ID NO: 4300 - DNA, 17 bp, Homo sapiens
tattcttaacctttttt

SEQ ID NO: 4301 - DNA, 17 bp, Homo sapiens
attcttaaccttttttg

SEQ ID NO: 4302 - DNA, 17 bp, Homo sapiens
ttcttaaccttttttgg

SEQ ID NO: 4303 - DNA, 17 bp, Homo sapiens
tcttaaccttttttgga

SEQ ID NO: 4304 - DNA, 17 bp, Homo sapiens
cttaaccttttttggaa

SEQ ID NO: 4305 - DNA, 17 bp, Homo sapiens
ttaaccttttttggaag

SEQ ID NO: 4306 - DNA, 17 bp, Homo sapiens
taaccttttttggaagg

SEQ ID NO: 4307 - DNA, 17 bp, Homo sapiens
aaccttttttggaaggt

SEQ ID NO: 4308 - DNA, 17 bp, Homo sapiens
accttttttggaaggtt

SEQ ID NO: 4309 - DNA, 17 bp, Homo sapiens
ccttttttggaaggttt

SEQ ID NO: 4310 - DNA, 17 bp, Homo sapiens
cttttttggaaggttta

SEQ ID NO: 4311 - DNA, 17 bp, Homo sapiens
ttttttggaaggtttat

SEQ ID NO: 4312 - DNA, 17 bp, Homo sapiens
tttttggaaggtttatt

SEQ ID NO: 4313 - DNA, 17 bp, Homo sapiens
ttttggaaggtttattt

SEQ ID NO: 4314 - DNA, 17 bp, Homo sapiens
tttggaaggtttatttg

SEQ ID NO: 4315 - DNA, 17 bp, Homo sapiens
ttggaaggtttatttga

SEQ ID NO: 4316 - DNA, 17 bp, Homo sapiens
tggaaggtttatttgaa

SEQ ID NO: 4317 - DNA, 17 bp, Homo sapiens
ggaaggtttatttgaat

SEQ ID NO: 4318 - DNA, 17 bp, Homo sapiens
gaaggtttatttgaata

SEQ ID NO: 4319 - DNA, 17 bp, Homo sapiens
aaggtttatttgaatat

SEQ ID NO: 4320 - DNA, 17 bp, Homo sapiens
aggtttatttgaatatc

SEQ ID NO: 4321 - DNA, 17 bp, Homo sapiens
ggtttatttgaatatcc

SEQ ID NO: 4322 - DNA, 17 bp, Homo sapiens
gtttatttgaatatcca

SEQ ID NO: 4323 - DNA, 17 bp, Homo sapiens
tttatttgaatatccac

SEQ ID NO: 4324 - DNA, 17 bp, Homo sapiens
ttatttgaatatccact

SEQ ID NO: 4325 - DNA, 17 bp, Homo sapiens
tatttgaatatccacta

SEQ ID NO: 4326 - DNA, 17 bp, Homo sapiens
atttgaatatccactaa

SEQ ID NO: 4327 - DNA, 17 bp, Homo sapiens
tttgaatatccactaac

SEQ ID NO: 4328 - DNA, 17 bp, Homo sapiens
ttgaatatccactaaca

SEQ ID NO: 4329 - DNA, 17 bp, Homo sapiens
tgaatatccactaacaa

SEQ ID NO: 4330 - DNA, 17 bp, Homo sapiens
gaatatccactaacaag

SEQ ID NO: 4331 - DNA, 17 bp, Homo sapiens
aatatccactaacaagt

SEQ ID NO: 4332 - DNA, 17 bp, Homo sapiens
atatccactaacaagtc

SEQ ID NO: 4333 - DNA, 17 bp, Homo sapiens
tatccactaacaagtca

SEQ ID NO: 4334 - DNA, 17 bp, Homo sapiens
atccactaacaagtcaa

SEQ ID NO: 4335 - DNA, 17 bp, Homo sapiens
tccactaacaagtcaaa

SEQ ID NO: 4336 - DNA, 17 bp, Homo sapiens
ccactaacaagtcaaag

SEQ ID NO: 4337 - DNA, 17 bp, Homo sapiens
cactaacaagtcaaaga

SEQ ID NO: 4338 - DNA, 17 bp, Homo sapiens
actaacaagtcaaagac

SEQ ID NO: 4339 - DNA, 17 bp, Homo sapiens
ctaacaagtcaaagacc

SEQ ID NO: 4340 - DNA, 17 bp, Homo sapiens
taacaagtcaaagacca

SEQ ID NO: 4341 - DNA, 17 bp, Homo sapiens
aacaagtcaaagaccaa

SEQ ID NO: 4342 - DNA, 17 bp, Homo sapiens
acaagtcaaagaccaat

SEQ ID NO: 4343 - DNA, 17 bp, Homo sapiens
caagtcaaagaccaatt

SEQ ID NO: 4344 - DNA, 17 bp, Homo sapiens
aagtcaaagaccaattc

SEQ ID NO: 4345 - DNA, 17 bp, Homo sapiens
agtcaaagaccaattct

SEQ ID NO: 4346 - DNA, 17 bp, Homo sapiens
gtcaaagaccaattcta

SEQ ID NO: 4347 - DNA, 17 bp, Homo sapiens
tcaaagaccaattctag

SEQ ID NO: 4348 - DNA, 17 bp, Homo sapiens
caaagaccaattctaga

SEQ ID NO: 4349 - DNA, 17 bp, Homo sapiens
aaagaccaattctagaa

SEQ ID NO: 4350 - DNA, 17 bp, Homo sapiens
aagaccaattctagaat

SEQ ID NO: 4351 - DNA, 17 bp, Homo sapiens
agaccaattctagaatt

SEQ ID NO: 4352 - DNA, 17 bp, Homo sapiens
gaccaattctagaattc

SEQ ID NO: 4353 - DNA, 17 bp, Homo sapiens
accaattctagaattcc

SEQ ID NO: 4354 - DNA, 17 bp, Homo sapiens
ccaattctagaattcct

SEQ ID NO: 4355 - DNA, 17 bp, Homo sapiens
caattctagaattcctg

SEQ ID NO: 4356 - DNA, 17 bp, Homo sapiens
aattctagaattcctga

SEQ ID NO: 4357 - DNA, 17 bp, Homo sapiens
attctagaattcctgat

SEQ ID NO: 4358 - DNA, 17 bp, Homo sapiens
ttctagaattcctgatt

SEQ ID NO: 4359 - DNA, 17 bp, Homo sapiens
tctagaattcctgattg

SEQ ID NO: 4360 - DNA, 17 bp, Homo sapiens
ctagaattcctgattgc

SEQ ID NO: 4361 - DNA, 17 bp, Homo sapiens
tagaattcctgattgcc

SEQ ID NO: 4362 - DNA, 17 bp, Homo sapiens
agaattcctgattgccc

SEQ ID NO: 4363 - DNA, 17 bp, Homo sapiens
gaattcctgattgccct

SEQ ID NO: 4364 - DNA, 17 bp, Homo sapiens
aattcctgattgcccta

SEQ ID NO: 4365 - DNA, 17 bp, Homo sapiens
attcctgattgccctat

SEQ ID NO: 4366 - DNA, 17 bp, Homo sapiens
ttcctgattgccctatt

SEQ ID NO: 4367 - DNA, 17 bp, Homo sapiens
tcctgattgccctattc

SEQ ID NO: 4368 - DNA, 17 bp, Homo sapiens
cctgattgccctattcc

SEQ ID NO: 4369 - DNA, 17 bp, Homo sapiens
ctgattgccctattcca

SEQ ID NO: 4370 - DNA, 17 bp, Homo sapiens
tgattgccctattccaa

SEQ ID NO: 4371 - DNA, 17 bp, Homo sapiens
gattgccctattccaat

SEQ ID NO: 4372 - DNA, 17 bp, Homo sapiens
attgccctattccaatc

SEQ ID NO: 4373 - DNA, 17 bp, Homo sapiens
ttgccctattccaatct

SEQ ID NO: 4374 - DNA, 17 bp, Homo sapiens
tgccctattccaatctg

SEQ ID NO: 4375 - DNA, 17 bp, Homo sapiens
gccctattccaatctga

SEQ ID NO: 4376 - DNA, 17 bp, Homo sapiens
ccctattccaatctgat

SEQ ID NO: 4377 - DNA, 17 bp, Homo sapiens
cctattccaatctgatt

SEQ ID NO: 4378 - DNA, 17 bp, Homo sapiens
ctattccaatctgattt

SEQ ID NO: 4379 - DNA, 17 bp, Homo sapiens
tattccaatctgatttt

SEQ ID NO: 4380 - DNA, 17 bp, Homo sapiens
attccaatctgattttt

SEQ ID NO: 4381 - DNA, 17 bp, Homo sapiens
ttccaatctgatttttt

SEQ ID NO: 4382 - DNA, 17 bp, Homo sapiens
tccaatctgattttttt

SEQ ID NO: 4383 - DNA, 17 bp, Homo sapiens
ccaatctgattttttta

SEQ ID NO: 4384 - DNA, 17 bp, Homo sapiens
caatctgatttttttaa

SEQ ID NO: 4385 - DNA, 17 bp, Homo sapiens
aatctgatttttttaaa

SEQ ID NO: 4386 - DNA, 17 bp, Homo sapiens
atctgatttttttaaat

SEQ ID NO: 4387 - DNA, 17 bp, Homo sapiens
tctgatttttttaaatg

SEQ ID NO: 4388 - DNA, 17 bp, Homo sapiens
ctgatttttttaaatgc

SEQ ID NO: 4389 - DNA, 17 bp, Homo sapiens
tgatttttttaaatgca

SEQ ID NO: 4390 - DNA, 17 bp, Homo sapiens
gatttttttaaatgcac

SEQ ID NO: 4391 - DNA, 17 bp, Homo sapiens
atttttttaaatgcact

SEQ ID NO: 4392 - DNA, 17 bp, Homo sapiens
tttttttaaatgcacta

SEQ ID NO: 4393 - DNA, 17 bp, Homo sapiens
ttttttaaatgcactat

SEQ ID NO: 4394 - DNA, 17 bp, Homo sapiens
tttttaaatgcactatt

SEQ ID NO: 4395 - DNA, 17 bp, Homo sapiens
ttttaaatgcactatta

SEQ ID NO: 4396 - DNA, 17 bp, Homo sapiens
tttaaatgcactattaa

SEQ ID NO: 4397 - DNA, 17 bp, Homo sapiens
ttaaatgcactattaag

SEQ ID NO: 4398 - DNA, 17 bp, Homo sapiens
taaatgcactattaaga

SEQ ID NO: 4399 - DNA, 17 bp, Homo sapiens
aaatgcactattaagaa

SEQ ID NO: 4400 - DNA, 17 bp, Homo sapiens
aatgcactattaagaat

SEQ ID NO: 4401 - DNA, 17 bp, Homo sapiens
atgcactattaagaata

SEQ ID NO: 4402 - DNA, 17 bp, Homo sapiens
tgcactattaagaatag

SEQ ID NO: 4403 - DNA, 17 bp, Homo sapiens
gcactattaagaatagt

SEQ ID NO: 4404 - DNA, 17 bp, Homo sapiens
cactattaagaatagtc

SEQ ID NO: 4405 - DNA, 17 bp, Homo sapiens
actattaagaatagtca

SEQ ID NO: 4406 - DNA, 17 bp, Homo sapiens
ctattaagaatagtcaa

SEQ ID NO: 4407 - DNA, 17 bp, Homo sapiens
tattaagaatagtcaac

SEQ ID NO: 4408 - DNA, 17 bp, Homo sapiens
attaagaatagtcaaca

SEQ ID NO: 4409 - DNA, 17 bp, Homo sapiens
ttaagaatagtcaacaa

SEQ ID NO: 4410 - DNA, 17 bp, Homo sapiens
taagaatagtcaacaaa

SEQ ID NO: 4411 - DNA, 17 bp, Homo sapiens
aagaatagtcaacaaac

SEQ ID NO: 4412 - DNA, 17 bp, Homo sapiens
agaatagtcaacaaact

SEQ ID NO: 4413 - DNA, 17 bp, Homo sapiens
gaatagtcaacaaacta

SEQ ID NO: 4414 - DNA, 17 bp, Homo sapiens
aatagtcaacaaactac

SEQ ID NO: 4415 - DNA, 25 bp, Homo sapiens
tccatgattaatcttgtcatttgta

SEQ ID NO: 4416 - DNA, 25 bp, Homo sapiens
ccatgattaatcttgtcatttgtac

SEQ ID NO: 4417 - DNA, 25 bp, Homo sapiens
catgattaatcttgtcatttgtaca

SEQ ID NO: 4418 - DNA, 25 bp, Homo sapiens
atgattaatcttgtcatttgtacag

SEQ ID NO: 4419 - DNA, 25 bp, Homo sapiens
tgattaatcttgtcatttgtacagg

SEQ ID NO: 4420 - DNA, 25 bp, Homo sapiens
gattaatcttgtcatttgtacaggg

SEQ ID NO: 4421 - DNA, 25 bp, Homo sapiens
attaatcttgtcatttgtacagggt

SEQ ID NO: 4422 - DNA, 25 bp, Homo sapiens
ttaatcttgtcatttgtacagggtt

SEQ ID NO: 4423 - DNA, 25 bp, Homo sapiens
taatcttgtcatttgtacagggttt

SEQ ID NO: 4424 - DNA, 25 bp, Homo sapiens
aatcttgtcatttgtacagggtttt

SEQ ID NO: 4425 - DNA, 25 bp, Homo sapiens
atcttgtcatttgtacagggttttc

SEQ ID NO: 4426 - DNA, 25 bp, Homo sapiens
tcttgtcatttgtacagggttttct

SEQ ID NO: 4427 - DNA, 25 bp, Homo sapiens
cttgtcatttgtacagggttttctt

SEQ ID NO: 4428 - DNA, 25 bp, Homo sapiens
ttgtcatttgtacagggttttcttt

SEQ ID NO: 4429 - DNA, 25 bp, Homo sapiens
tgtcatttgtacagggttttctttc

SEQ ID NO: 4430 - DNA, 25 bp, Homo sapiens
gtcatttgtacagggttttctttcg

SEQ ID NO: 4431 - DNA, 25 bp, Homo sapiens
tcatttgtacagggttttctttcga

SEQ ID NO: 4432 - DNA, 25 bp, Homo sapiens
catttgtacagggttttctttcgat

SEQ ID NO: 4433 - DNA, 25 bp, Homo sapiens
atttgtacagggttttctttcgatt

SEQ ID NO: 4434 - DNA, 25 bp, Homo sapiens
tttgtacagggttttctttcgattt

SEQ ID NO: 4435 - DNA, 25 bp, Homo sapiens
ttgtacagggttttctttcgatttt

SEQ ID NO: 4436 - DNA, 25 bp, Homo sapiens
tgtacagggttttctttcgattttt

SEQ ID NO: 4437 - DNA, 25 bp, Homo sapiens
gtacagggttttctttcgatttttc

SEQ ID NO: 4438 - DNA, 25 bp, Homo sapiens
tacagggttttctttcgatttttct

SEQ ID NO: 4439 - DNA, 25 bp, Homo sapiens
acagggttttctttcgatttttctg

SEQ ID NO: 4440 - DNA, 25 bp, Homo sapiens
cagggttttctttcgatttttctgc

SEQ ID NO: 4441 - DNA, 25 bp, Homo sapiens
agggttttctttcgatttttctgca

SEQ ID NO: 4442 - DNA, 25 bp, Homo sapiens
gggttttctttcgatttttctgcac

SEQ ID NO: 4443 - DNA, 25 bp, Homo sapiens
ggttttctttcgatttttctgcaca

SEQ ID NO: 4444 - DNA, 25 bp, Homo sapiens
gttttctttcgatttttctgcacac

SEQ ID NO: 4445 - DNA, 25 bp, Homo sapiens
ttttctttcgatttttctgcacaca

SEQ ID NO: 4446 - DNA, 25 bp, Homo sapiens
tttctttcgatttttctgcacacat

SEQ ID NO: 4447 - DNA, 25 bp, Homo sapiens
ttctttcgatttttctgcacacatt

SEQ ID NO: 4448 - DNA, 25 bp, Homo sapiens
tctttcgatttttctgcacacattt

SEQ ID NO: 4449 - DNA, 25 bp, Homo sapiens
ctttcgatttttctgcacacatttc

SEQ ID NO: 4450 - DNA, 25 bp, Homo sapiens
tttcgatttttctgcacacatttcc

SEQ ID NO: 4451 - DNA, 25 bp, Homo sapiens
ttcgatttttctgcacacatttcct

SEQ ID NO: 4452 - DNA, 25 bp, Homo sapiens
tcgatttttctgcacacatttccta

SEQ ID NO: 4453 - DNA, 25 bp, Homo sapiens
cgatttttctgcacacatttcctat

SEQ ID NO: 4454 - DNA, 25 bp, Homo sapiens
gatttttctgcacacatttcctatg

SEQ ID NO: 4455 - DNA, 25 bp, Homo sapiens
atttttctgcacacatttcctatgc

SEQ ID NO: 4456 - DNA, 25 bp, Homo sapiens
tttttctgcacacatttcctatgca

SEQ ID NO: 4457 - DNA, 25 bp, Homo sapiens
ttttctgcacacatttcctatgcat

SEQ ID NO: 4458 - DNA, 25 bp, Homo sapiens
tttctgcacacatttcctatgcatt

SEQ ID NO: 4459 - DNA, 25 bp, Homo sapiens
ttctgcacacatttcctatgcattt

SEQ ID NO: 4460 - DNA, 25 bp, Homo sapiens
tctgcacacatttcctatgcatttg

SEQ ID NO: 4461 - DNA, 25 bp, Homo sapiens
ctgcacacatttcctatgcatttgt

SEQ ID NO: 4462 - DNA, 25 bp, Homo sapiens
tgcacacatttcctatgcatttgtt

SEQ ID NO: 4463 - DNA, 25 bp, Homo sapiens
gcacacatttcctatgcatttgttt

SEQ ID NO: 4464 - DNA, 25 bp, Homo sapiens
cacacatttcctatgcatttgtttc

SEQ ID NO: 4465 - DNA, 25 bp, Homo sapiens
acacatttcctatgcatttgtttct

SEQ ID NO: 4466 - DNA, 25 bp, Homo sapiens
cacatttcctatgcatttgtttcta

SEQ ID NO: 4467 - DNA, 25 bp, Homo sapiens
acatttcctatgcatttgtttctag

SEQ ID NO: 4468 - DNA, 25 bp, Homo sapiens
catttcctatgcatttgtttctagt

SEQ ID NO: 4469 - DNA, 25 bp, Homo sapiens
atttcctatgcatttgtttctagtt

SEQ ID NO: 4470 - DNA, 25 bp, Homo sapiens
tttcctatgcatttgtttctagttc

SEQ ID NO: 4471 - DNA, 25 bp, Homo sapiens
ttcctatgcatttgtttctagttct

SEQ ID NO: 4472 - DNA, 25 bp, Homo sapiens
tcctatgcatttgtttctagttctc

SEQ ID NO: 4473 - DNA, 25 bp, Homo sapiens
cctatgcatttgtttctagttctca

SEQ ID NO: 4474 - DNA, 25 bp, Homo sapiens
ctatgcatttgtttctagttctcaa

SEQ ID NO: 4475 - DNA, 25 bp, Homo sapiens
tatgcatttgtttctagttctcaac

SEQ ID NO: 4476 - DNA, 25 bp, Homo sapiens
atgcatttgtttctagttctcaacc

SEQ ID NO: 4477 - DNA, 25 bp, Homo sapiens
tgcatttgtttctagttctcaaccc

SEQ ID NO: 4478 - DNA, 25 bp, Homo sapiens
gcatttgtttctagttctcaaccct

SEQ ID NO: 4479 - DNA, 25 bp, Homo sapiens
catttgtttctagttctcaaccctc

SEQ ID NO: 4480 - DNA, 25 bp, Homo sapiens
atttgtttctagttctcaaccctca

SEQ ID NO: 4481 - DNA, 25 bp, Homo sapiens
tttgtttctagttctcaaccctcag

SEQ ID NO: 4482 - DNA, 25 bp, Homo sapiens
ttgtttctagttctcaaccctcagt

SEQ ID NO: 4483 - DNA, 25 bp, Homo sapiens
tgtttctagttctcaaccctcagta

SEQ ID NO: 4484 - DNA, 25 bp, Homo sapiens
gtttctagttctcaaccctcagtaa

SEQ ID NO: 4485 - DNA, 25 bp, Homo sapiens
tttctagttctcaaccctcagtaaa

SEQ ID NO: 4486 - DNA, 25 bp, Homo sapiens
ttctagttctcaaccctcagtaaac

SEQ ID NO: 4487 - DNA, 25 bp, Homo sapiens
tctagttctcaaccctcagtaaacc

SEQ ID NO: 4488 - DNA, 25 bp, Homo sapiens
ctagttctcaaccctcagtaaacca

SEQ ID NO: 4489 - DNA, 25 bp, Homo sapiens
tagttctcaaccctcagtaaaccaa

SEQ ID NO: 4490 - DNA, 25 bp, Homo sapiens
agttctcaaccctcagtaaaccaaa

SEQ ID NO: 4491 - DNA, 25 bp, Homo sapiens
gttctcaaccctcagtaaaccaaaa

SEQ ID NO: 4492 - DNA, 25 bp, Homo sapiens
ttctcaaccctcagtaaaccaaaaa

SEQ ID NO: 4493 - DNA, 25 bp, Homo sapiens
tctcaaccctcagtaaaccaaaaat

SEQ ID NO: 4494 - DNA, 25 bp, Homo sapiens
ctcaaccctcagtaaaccaaaaatc

SEQ ID NO: 4495 - DNA, 25 bp, Homo sapiens
tcaaccctcagtaaaccaaaaatca

SEQ ID NO: 4496 - DNA, 25 bp, Homo sapiens
caaccctcagtaaaccaaaaatcag

SEQ ID NO: 4497 - DNA, 25 bp, Homo sapiens
aaccctcagtaaaccaaaaatcagt

SEQ ID NO: 4498 - DNA, 25 bp, Homo sapiens
accctcagtaaaccaaaaatcagtt

SEQ ID NO: 4499 - DNA, 25 bp, Homo sapiens
ccctcagtaaaccaaaaatcagttg

SEQ ID NO: 4500 - DNA, 25 bp, Homo sapiens
cctcagtaaaccaaaaatcagttga

SEQ ID NO: 4501 - DNA, 25 bp, Homo sapiens
ctcagtaaaccaaaaatcagttgag

SEQ ID NO: 4502 - DNA, 25 bp, Homo sapiens
tcagtaaaccaaaaatcagttgagg

SEQ ID NO: 4503 - DNA, 25 bp, Homo sapiens
cagtaaaccaaaaatcagttgaggc

SEQ ID NO: 4504 - DNA, 25 bp, Homo sapiens
agtaaaccaaaaatcagttgaggca

SEQ ID NO: 4505 - DNA, 25 bp, Homo sapiens
gtaaaccaaaaatcagttgaggcat

SEQ ID NO: 4506 - DNA, 25 bp, Homo sapiens
taaaccaaaaatcagttgaggcatt

SEQ ID NO: 4507 - DNA, 25 bp, Homo sapiens
aaaccaaaaatcagttgaggcattg

SEQ ID NO: 4508 - DNA, 25 bp, Homo sapiens
aaccaaaaatcagttgaggcattgt

SEQ ID NO: 4509 - DNA, 25 bp, Homo sapiens
accaaaaatcagttgaggcattgta

SEQ ID NO: 4510 - DNA, 25 bp, Homo sapiens
ccaaaaatcagttgaggcattgtat

SEQ ID NO: 4511 - DNA, 25 bp, Homo sapiens
caaaaatcagttgaggcattgtatc

SEQ ID NO: 4512 - DNA, 25 bp, Homo sapiens
aaaaatcagttgaggcattgtatct

SEQ ID NO: 4513 - DNA, 25 bp, Homo sapiens
aaaatcagttgaggcattgtatctt

SEQ ID NO: 4514 - DNA, 25 bp, Homo sapiens
aaatcagttgaggcattgtatcttc

SEQ ID NO: 4515 - DNA, 25 bp, Homo sapiens
aatcagttgaggcattgtatcttct

SEQ ID NO: 4516 - DNA, 25 bp, Homo sapiens
atcagttgaggcattgtatcttcta

SEQ ID NO: 4517 - DNA, 25 bp, Homo sapiens
tcagttgaggcattgtatcttctag

SEQ ID NO: 4518 - DNA, 25 bp, Homo sapiens
cagttgaggcattgtatcttctagg

SEQ ID NO: 4519 - DNA, 25 bp, Homo sapiens
agttgaggcattgtatcttctaggc

SEQ ID NO: 4520 - DNA, 25 bp, Homo sapiens
gttgaggcattgtatcttctaggct

SEQ ID NO: 4521 - DNA, 25 bp, Homo sapiens
ttgaggcattgtatcttctaggcta

SEQ ID NO: 4522 - DNA, 25 bp, Homo sapiens
tgaggcattgtatcttctaggctac

SEQ ID NO: 4523 - DNA, 25 bp, Homo sapiens
gaggcattgtatcttctaggctacc

SEQ ID NO: 4524 - DNA, 25 bp, Homo sapiens
aggcattgtatcttctaggctaccc

SEQ ID NO: 4525 - DNA, 25 bp, Homo sapiens
ggcattgtatcttctaggctaccca

SEQ ID NO: 4526 - DNA, 25 bp, Homo sapiens
gcattgtatcttctaggctacccag

SEQ ID NO: 4527 - DNA, 25 bp, Homo sapiens
cattgtatcttctaggctacccagt

SEQ ID NO: 4528 - DNA, 25 bp, Homo sapiens
attgtatcttctaggctacccagtg

SEQ ID NO: 4529 - DNA, 25 bp, Homo sapiens
ttgtatcttctaggctacccagtgt

SEQ ID NO: 4530 - DNA, 25 bp, Homo sapiens
tgtatcttctaggctacccagtgtt

SEQ ID NO: 4531 - DNA, 25 bp, Homo sapiens
gtatcttctaggctacccagtgtta

SEQ ID NO: 4532 - DNA, 25 bp, Homo sapiens
tatcttctaggctacccagtgttac

SEQ ID NO: 4533 - DNA, 25 bp, Homo sapiens
atcttctaggctacccagtgttaca

SEQ ID NO: 4534 - DNA, 25 bp, Homo sapiens
tcttctaggctacccagtgttacaa

SEQ ID NO: 4535 - DNA, 25 bp, Homo sapiens
cttctaggctacccagtgttacaaa

SEQ ID NO: 4536 - DNA, 25 bp, Homo sapiens
ttctaggctacccagtgttacaaag

SEQ ID NO: 4537 - DNA, 25 bp, Homo sapiens
tctaggctacccagtgttacaaagt

SEQ ID NO: 4538 - DNA, 25 bp, Homo sapiens
ctaggctacccagtgttacaaagtg

SEQ ID NO: 4539 - DNA, 25 bp, Homo sapiens
taggctacccagtgttacaaagtgc

SEQ ID NO: 4540 - DNA, 25 bp, Homo sapiens
aggctacccagtgttacaaagtgca

SEQ ID NO: 4541 - DNA, 25 bp, Homo sapiens
ggctacccagtgttacaaagtgcaa

SEQ ID NO: 4542 - DNA, 25 bp, Homo sapiens
gctacccagtgttacaaagtgcaat

SEQ ID NO: 4543 - DNA, 25 bp, Homo sapiens
ctacccagtgttacaaagtgcaatt

SEQ ID NO: 4544 - DNA, 25 bp, Homo sapiens
tacccagtgttacaaagtgcaattt

SEQ ID NO: 4545 - DNA, 25 bp, Homo sapiens
acccagtgttacaaagtgcaatttc

SEQ ID NO: 4546 - DNA, 25 bp, Homo sapiens
cccagtgttacaaagtgcaatttca

SEQ ID NO: 4547 - DNA, 25 bp, Homo sapiens
ccagtgttacaaagtgcaatttcaa

SEQ ID NO: 4548 - DNA, 25 bp, Homo sapiens
cagtgttacaaagtgcaatttcaac

SEQ ID NO: 4549 - DNA, 25 bp, Homo sapiens
agtgttacaaagtgcaatttcaaca

SEQ ID NO: 4550 - DNA, 25 bp, Homo sapiens
gtgttacaaagtgcaatttcaacaa

SEQ ID NO: 4551 - DNA, 25 bp, Homo sapiens
tgttacaaagtgcaatttcaacaat

SEQ ID NO: 4552 - DNA, 25 bp, Homo sapiens
gttacaaagtgcaatttcaacaata

SEQ ID NO: 4553 - DNA, 25 bp, Homo sapiens
ttacaaagtgcaatttcaacaataa

SEQ ID NO: 4554 - DNA, 25 bp, Homo sapiens
tacaaagtgcaatttcaacaataat

SEQ ID NO: 4555 - DNA, 25 bp, Homo sapiens
acaaagtgcaatttcaacaataata

SEQ ID NO: 4556 - DNA, 25 bp, Homo sapiens
caaagtgcaatttcaacaataatag

SEQ ID NO: 4557 - DNA, 25 bp, Homo sapiens
aaagtgcaatttcaacaataatagg

SEQ ID NO: 4558 - DNA, 25 bp, Homo sapiens
aagtgcaatttcaacaataataggg

SEQ ID NO: 4559 - DNA, 25 bp, Homo sapiens
agtgcaatttcaacaataatagggg

SEQ ID NO: 4560 - DNA, 25 bp, Homo sapiens
gtgcaatttcaacaataataggggt

SEQ ID NO: 4561 - DNA, 25 bp, Homo sapiens
tgcaatttcaacaataataggggtg

SEQ ID NO: 4562 - DNA, 25 bp, Homo sapiens
gcaatttcaacaataataggggtgt

SEQ ID NO: 4563 - DNA, 25 bp, Homo sapiens
caatttcaacaataataggggtgtg

SEQ ID NO: 4564 - DNA, 25 bp, Homo sapiens
aatttcaacaataataggggtgtgt

SEQ ID NO: 4565 - DNA, 25 bp, Homo sapiens
atttcaacaataataggggtgtgtg

SEQ ID NO: 4566 - DNA, 25 bp, Homo sapiens
tttcaacaataataggggtgtgtgt

SEQ ID NO: 4567 - DNA, 25 bp, Homo sapiens
ttcaacaataataggggtgtgtgtt

SEQ ID NO: 4568 - DNA, 25 bp, Homo sapiens
tcaacaataataggggtgtgtgttt

SEQ ID NO: 4569 - DNA, 25 bp, Homo sapiens
caacaataataggggtgtgtgtttt

SEQ ID NO: 4570 - DNA, 25 bp, Homo sapiens
aacaataataggggtgtgtgtttta

SEQ ID NO: 4571 - DNA, 25 bp, Homo sapiens
acaataataggggtgtgtgttttag

SEQ ID NO: 4572 - DNA, 25 bp, Homo sapiens
caataataggggtgtgtgttttagc

SEQ ID NO: 4573 - DNA, 25 bp, Homo sapiens
aataataggggtgtgtgttttagct

SEQ ID NO: 4574 - DNA, 25 bp, Homo sapiens
ataataggggtgtgtgttttagctg

SEQ ID NO: 4575 - DNA, 25 bp, Homo sapiens
taataggggtgtgtgttttagctgc

SEQ ID NO: 4576 - DNA, 25 bp, Homo sapiens
aataggggtgtgtgttttagctgca

SEQ ID NO: 4577 - DNA, 25 bp, Homo sapiens
ataggggtgtgtgttttagctgcag

SEQ ID NO: 4578 - DNA, 25 bp, Homo sapiens
taggggtgtgtgttttagctgcagc

SEQ ID NO: 4579 - DNA, 25 bp, Homo sapiens
aggggtgtgtgttttagctgcagcg

SEQ ID NO: 4580 - DNA, 25 bp, Homo sapiens
ggggtgtgtgttttagctgcagcga

SEQ ID NO: 4581 - DNA, 25 bp, Homo sapiens
gggtgtgtgttttagctgcagcgaa

SEQ ID NO: 4582 - DNA, 25 bp, Homo sapiens
ggtgtgtgttttagctgcagcgaaa

SEQ ID NO: 4583 - DNA, 25 bp, Homo sapiens
gtgtgtgttttagctgcagcgaaag

SEQ ID NO: 4584 - DNA, 25 bp, Homo sapiens
tgtgtgttttagctgcagcgaaagc

SEQ ID NO: 4585 - DNA, 25 bp, Homo sapiens
gtgtgttttagctgcagcgaaagca

SEQ ID NO: 4586 - DNA, 25 bp, Homo sapiens
tgtgttttagctgcagcgaaagcat

SEQ ID NO: 4587 - DNA, 25 bp, Homo sapiens
gtgttttagctgcagcgaaagcata

SEQ ID NO: 4588 - DNA, 25 bp, Homo sapiens
tgttttagctgcagcgaaagcatac

SEQ ID NO: 4589 - DNA, 25 bp, Homo sapiens
gttttagctgcagcgaaagcataca

SEQ ID NO: 4590 - DNA, 25 bp, Homo sapiens
ttttagctgcagcgaaagcatacat

SEQ ID NO: 4591 - DNA, 25 bp, Homo sapiens
tttagctgcagcgaaagcatacatc

SEQ ID NO: 4592 - DNA, 25 bp, Homo sapiens
ttagctgcagcgaaagcatacatct

SEQ ID NO: 4593 - DNA, 25 bp, Homo sapiens
tagctgcagcgaaagcatacatctt

SEQ ID NO: 4594 - DNA, 25 bp, Homo sapiens
agctgcagcgaaagcatacatcttc

SEQ ID NO: 4595 - DNA, 25 bp, Homo sapiens
gctgcagcgaaagcatacatcttca

SEQ ID NO: 4596 - DNA, 25 bp, Homo sapiens
ctgcagcgaaagcatacatcttcag

SEQ ID NO: 4597 - DNA, 25 bp, Homo sapiens
tgcagcgaaagcatacatcttcaga

SEQ ID NO: 4598 - DNA, 25 bp, Homo sapiens
gcagcgaaagcatacatcttcagaa

SEQ ID NO: 4599 - DNA, 25 bp, Homo sapiens
cagcgaaagcatacatcttcagaac

SEQ ID NO: 4600 - DNA, 25 bp, Homo sapiens
agcgaaagcatacatcttcagaaca

SEQ ID NO: 4601 - DNA, 25 bp, Homo sapiens
gcgaaagcatacatcttcagaacat

SEQ ID NO: 4602 - DNA, 25 bp, Homo sapiens
cgaaagcatacatcttcagaacatt

SEQ ID NO: 4603 - DNA, 25 bp, Homo sapiens
gaaagcatacatcttcagaacattt

SEQ ID NO: 4604 - DNA, 25 bp, Homo sapiens
aaagcatacatcttcagaacatttt

SEQ ID NO: 4605 - DNA, 25 bp, Homo sapiens
aagcatacatcttcagaacattttt

SEQ ID NO: 4606 - DNA, 25 bp, Homo sapiens
agcatacatcttcagaacatttttt

SEQ ID NO: 4607 - DNA, 25 bp, Homo sapiens
gcatacatcttcagaacatttttta

SEQ ID NO: 4608 - DNA, 25 bp, Homo sapiens
catacatcttcagaacattttttaa

SEQ ID NO: 4609 - DNA, 25 bp, Homo sapiens
atacatcttcagaacattttttaag

SEQ ID NO: 4610 - DNA, 25 bp, Homo sapiens
tacatcttcagaacattttttaaga

SEQ ID NO: 4611 - DNA, 25 bp, Homo sapiens
acatcttcagaacattttttaagat

SEQ ID NO: 4612 - DNA, 25 bp, Homo sapiens
catcttcagaacattttttaagatt

SEQ ID NO: 4613 - DNA, 25 bp, Homo sapiens
atcttcagaacattttttaagatta

SEQ ID NO: 4614 - DNA, 25 bp, Homo sapiens
tcttcagaacattttttaagattat

SEQ ID NO: 4615 - DNA, 25 bp, Homo sapiens
cttcagaacattttttaagattatg

SEQ ID NO: 4616 - DNA, 25 bp, Homo sapiens
ttcagaacattttttaagattatgt

SEQ ID NO: 4617 - DNA, 25 bp, Homo sapiens
tcagaacattttttaagattatgtt

SEQ ID NO: 4618 - DNA, 25 bp, Homo sapiens
cagaacattttttaagattatgttt

SEQ ID NO: 4619 - DNA, 25 bp, Homo sapiens
agaacattttttaagattatgtttc

SEQ ID NO: 4620 - DNA, 25 bp, Homo sapiens
gaacattttttaagattatgtttct

SEQ ID NO: 4621 - DNA, 25 bp, Homo sapiens
aacattttttaagattatgtttctt

SEQ ID NO: 4622 - DNA, 25 bp, Homo sapiens
acattttttaagattatgtttcttg

SEQ ID NO: 4623 - DNA, 25 bp, Homo sapiens
cattttttaagattatgtttcttgt

SEQ ID NO: 4624 - DNA, 25 bp, Homo sapiens
attttttaagattatgtttcttgtt

SEQ ID NO: 4625 - DNA, 25 bp, Homo sapiens
ttttttaagattatgtttcttgtta

SEQ ID NO: 4626 - DNA, 25 bp, Homo sapiens
tttttaagattatgtttcttgttat

SEQ ID NO: 4627 - DNA, 25 bp, Homo sapiens
ttttaagattatgtttcttgttatg

SEQ ID NO: 4628 - DNA, 25 bp, Homo sapiens
tttaagattatgtttcttgttatga

SEQ ID NO: 4629 - DNA, 25 bp, Homo sapiens
ttaagattatgtttcttgttatgat

SEQ ID NO: 4630 - DNA, 25 bp, Homo sapiens
taagattatgtttcttgttatgata

SEQ ID NO: 4631 - DNA, 25 bp, Homo sapiens
aagattatgtttcttgttatgatat

SEQ ID NO: 4632 - DNA, 25 bp, Homo sapiens
agattatgtttcttgttatgatatt

SEQ ID NO: 4633 - DNA, 25 bp, Homo sapiens
gattatgtttcttgttatgatattt

SEQ ID NO: 4634 - DNA, 25 bp, Homo sapiens
attatgtttcttgttatgatatttg

SEQ ID NO: 4635 - DNA, 25 bp, Homo sapiens
ttatgtttcttgttatgatatttgg

SEQ ID NO: 4636 - DNA, 25 bp, Homo sapiens
tatgtttcttgttatgatatttggg

SEQ ID NO: 4637 - DNA, 25 bp, Homo sapiens
atgtttcttgttatgatatttgggg

SEQ ID NO: 4638 - DNA, 25 bp, Homo sapiens
tgtttcttgttatgatatttggggc

SEQ ID NO: 4639 - DNA, 25 bp, Homo sapiens
gtttcttgttatgatatttggggca

SEQ ID NO: 4640 - DNA, 25 bp, Homo sapiens
tttcttgttatgatatttggggcag

SEQ ID NO: 4641 - DNA, 25 bp, Homo sapiens
ttcttgttatgatatttggggcagc

SEQ ID NO: 4642 - DNA, 25 bp, Homo sapiens
tcttgttatgatatttggggcagct

SEQ ID NO: 4643 - DNA, 25 bp, Homo sapiens
cttgttatgatatttggggcagctc

SEQ ID NO: 4644 - DNA, 25 bp, Homo sapiens
ttgttatgatatttggggcagctca

SEQ ID NO: 4645 - DNA, 25 bp, Homo sapiens
tgttatgatatttggggcagctcat

SEQ ID NO: 4646 - DNA, 25 bp, Homo sapiens
gttatgatatttggggcagctcatg

SEQ ID NO: 4647 - DNA, 25 bp, Homo sapiens
ttatgatatttggggcagctcatgg

SEQ ID NO: 4648 - DNA, 25 bp, Homo sapiens
tatgatatttggggcagctcatggc

SEQ ID NO: 4649 - DNA, 25 bp, Homo sapiens
atgatatttggggcagctcatggcc

SEQ ID NO: 4650 - DNA, 25 bp, Homo sapiens
tgatatttggggcagctcatggcct

SEQ ID NO: 4651 - DNA, 25 bp, Homo sapiens
gatatttggggcagctcatggccta

SEQ ID NO: 4652 - DNA, 25 bp, Homo sapiens
atatttggggcagctcatggcctaa

SEQ ID NO: 4653 - DNA, 25 bp, Homo sapiens
tatttggggcagctcatggcctaat

SEQ ID NO: 4654 - DNA, 25 bp, Homo sapiens
atttggggcagctcatggcctaatt

SEQ ID NO: 4655 - DNA, 25 bp, Homo sapiens
tttggggcagctcatggcctaattt

SEQ ID NO: 4656 - DNA, 25 bp, Homo sapiens
ttggggcagctcatggcctaatttt

SEQ ID NO: 4657 - DNA, 25 bp, Homo sapiens
tggggcagctcatggcctaattttt

SEQ ID NO: 4658 - DNA, 25 bp, Homo sapiens
ggggcagctcatggcctaattttta

SEQ ID NO: 4659 - DNA, 25 bp, Homo sapiens
gggcagctcatggcctaatttttat

SEQ ID NO: 4660 - DNA, 25 bp, Homo sapiens
ggcagctcatggcctaatttttatt

SEQ ID NO: 4661 - DNA, 25 bp, Homo sapiens
gcagctcatggcctaatttttattc

SEQ ID NO: 4662 - DNA, 25 bp, Homo sapiens
cagctcatggcctaatttttattcc

SEQ ID NO: 4663 - DNA, 25 bp, Homo sapiens
agctcatggcctaatttttattcca

SEQ ID NO: 4664 - DNA, 25 bp, Homo sapiens
gctcatggcctaatttttattccag

SEQ ID NO: 4665 - DNA, 25 bp, Homo sapiens
ctcatggcctaatttttattccagt

SEQ ID NO: 4666 - DNA, 25 bp, Homo sapiens
tcatggcctaatttttattccagta

SEQ ID NO: 4667 - DNA, 25 bp, Homo sapiens
catggcctaatttttattccagtat

SEQ ID NO: 4668 - DNA, 25 bp, Homo sapiens
atggcctaatttttattccagtatt

SEQ ID NO: 4669 - DNA, 25 bp, Homo sapiens
tggcctaatttttattccagtattc

SEQ ID NO: 4670 - DNA, 25 bp, Homo sapiens
ggcctaatttttattccagtattct

SEQ ID NO: 4671 - DNA, 25 bp, Homo sapiens
gcctaatttttattccagtattctt

SEQ ID NO: 4672 - DNA, 25 bp, Homo sapiens
cctaatttttattccagtattctta

SEQ ID NO: 4673 - DNA, 25 bp, Homo sapiens
ctaatttttattccagtattcttaa

SEQ ID NO: 4674 - DNA, 25 bp, Homo sapiens
taatttttattccagtattcttaac

SEQ ID NO: 4675 - DNA, 25 bp, Homo sapiens
aatttttattccagtattcttaacc

SEQ ID NO: 4676 - DNA, 25 bp, Homo sapiens
atttttattccagtattcttaacct

SEQ ID NO: 4677 - DNA, 25 bp, Homo sapiens
tttttattccagtattcttaacctt

SEQ ID NO: 4678 - DNA, 25 bp, Homo sapiens
ttttattccagtattcttaaccttt

SEQ ID NO: 4679 - DNA, 25 bp, Homo sapiens
tttattccagtattcttaacctttt

SEQ ID NO: 4680 - DNA, 25 bp, Homo sapiens
ttattccagtattcttaaccttttt

SEQ ID NO: 4681 - DNA, 25 bp, Homo sapiens
tattccagtattcttaacctttttt

SEQ ID NO: 4682 - DNA, 25 bp, Homo sapiens
attccagtattcttaaccttttttg

SEQ ID NO: 4683 - DNA, 25 bp, Homo sapiens
ttccagtattcttaaccttttttgg

SEQ ID NO: 4684 - DNA, 25 bp, Homo sapiens
tccagtattcttaaccttttttgga

SEQ ID NO: 4685 - DNA, 25 bp, Homo sapiens
ccagtattcttaaccttttttggaa

SEQ ID NO: 4686 - DNA, 25 bp, Homo sapiens
cagtattcttaaccttttttggaag

SEQ ID NO: 4687 - DNA, 25 bp, Homo sapiens
agtattcttaaccttttttggaagg

SEQ ID NO: 4688 - DNA, 25 bp, Homo sapiens
gtattcttaaccttttttggaaggt

SEQ ID NO: 4689 - DNA, 25 bp, Homo sapiens
tattcttaaccttttttggaaggtt

SEQ ID NO: 4690 - DNA, 25 bp, Homo sapiens
attcttaaccttttttggaaggttt

SEQ ID NO: 4691 - DNA, 25 bp, Homo sapiens
ttcttaaccttttttggaaggttta

SEQ ID NO: 4692 - DNA, 25 bp, Homo sapiens
tcttaaccttttttggaaggtttat

SEQ ID NO: 4693 - DNA, 25 bp, Homo sapiens
cttaaccttttttggaaggtttatt

SEQ ID NO: 4694 - DNA, 25 bp, Homo sapiens
ttaaccttttttggaaggtttattt

SEQ ID NO: 4695 - DNA, 25 bp, Homo sapiens
taaccttttttggaaggtttatttg

SEQ ID NO: 4696 - DNA, 25 bp, Homo sapiens
aaccttttttggaaggtttatttga

SEQ ID NO: 4697 - DNA, 25 bp, Homo sapiens
accttttttggaaggtttatttgaa

SEQ ID NO: 4698 - DNA, 25 bp, Homo sapiens
ccttttttggaaggtttatttgaat

SEQ ID NO: 4699 - DNA, 25 bp, Homo sapiens
cttttttggaaggtttatttgaata

SEQ ID NO: 4700 - DNA, 25 bp, Homo sapiens
ttttttggaaggtttatttgaatat

SEQ ID NO: 4701 - DNA, 25 bp, Homo sapiens
tttttggaaggtttatttgaatatc

SEQ ID NO: 4702 - DNA, 25 bp, Homo sapiens
ttttggaaggtttatttgaatatcc

SEQ ID NO: 4703 - DNA, 25 bp, Homo sapiens
tttggaaggtttatttgaatatcca

SEQ ID NO: 4704 - DNA, 25 bp, Homo sapiens
ttggaaggtttatttgaatatccac

SEQ ID NO: 4705 - DNA, 25 bp, Homo sapiens
tggaaggtttatttgaatatccact

SEQ ID NO: 4706 - DNA, 25 bp, Homo sapiens
ggaaggtttatttgaatatccacta

SEQ ID NO: 4707 - DNA, 25 bp, Homo sapiens
gaaggtttatttgaatatccactaa

SEQ ID NO: 4708 - DNA, 25 bp, Homo sapiens
aaggtttatttgaatatccactaac

SEQ ID NO: 4709 - DNA, 25 bp, Homo sapiens
aggtttatttgaatatccactaaca

SEQ ID NO: 4710 - DNA, 25 bp, Homo sapiens
ggtttatttgaatatccactaacaa

SEQ ID NO: 4711 - DNA, 25 bp, Homo sapiens
gtttatttgaatatccactaacaag

SEQ ID NO: 4712 - DNA, 25 bp, Homo sapiens
tttatttgaatatccactaacaagt

SEQ ID NO: 4713 - DNA, 25 bp, Homo sapiens
ttatttgaatatccactaacaagtc

SEQ ID NO: 4714 - DNA, 25 bp, Homo sapiens
tatttgaatatccactaacaagtca

SEQ ID NO: 4715 - DNA, 25 bp, Homo sapiens
atttgaatatccactaacaagtcaa

SEQ ID NO: 4716 - DNA, 25 bp, Homo sapiens
tttgaatatccactaacaagtcaaa

SEQ ID NO: 4717 - DNA, 25 bp, Homo sapiens
ttgaatatccactaacaagtcaaag

SEQ ID NO: 4718 - DNA, 25 bp, Homo sapiens
tgaatatccactaacaagtcaaaga

SEQ ID NO: 4719 - DNA, 25 bp, Homo sapiens
gaatatccactaacaagtcaaagac

SEQ ID NO: 4720 - DNA, 25 bp, Homo sapiens
aatatccactaacaagtcaaagacc

SEQ ID NO: 4721 - DNA, 25 bp, Homo sapiens
atatccactaacaagtcaaagacca

SEQ ID NO: 4722 - DNA, 25 bp, Homo sapiens
tatccactaacaagtcaaagaccaa

SEQ ID NO: 4723 - DNA, 25 bp, Homo sapiens
atccactaacaagtcaaagaccaat

SEQ ID NO: 4724 - DNA, 25 bp, Homo sapiens
tccactaacaagtcaaagaccaatt

SEQ ID NO: 4725 - DNA, 25 bp, Homo sapiens
ccactaacaagtcaaagaccaattc

SEQ ID NO: 4726 - DNA, 25 bp, Homo sapiens
cactaacaagtcaaagaccaattct

SEQ ID NO: 4727 - DNA, 25 bp, Homo sapiens
actaacaagtcaaagaccaattcta

SEQ ID NO: 4728 - DNA, 25 bp, Homo sapiens
ctaacaagtcaaagaccaattctag

SEQ ID NO: 4729 - DNA, 25 bp, Homo sapiens
taacaagtcaaagaccaattctaga

SEQ ID NO: 4730 - DNA, 25 bp, Homo sapiens
aacaagtcaaagaccaattctagaa

SEQ ID NO: 4731 - DNA, 25 bp, Homo sapiens
acaagtcaaagaccaattctagaat

SEQ ID NO: 4732 - DNA, 25 bp, Homo sapiens
caagtcaaagaccaattctagaatt

SEQ ID NO: 4733 - DNA, 25 bp, Homo sapiens
aagtcaaagaccaattctagaattc

SEQ ID NO: 4734 - DNA, 25 bp, Homo sapiens
agtcaaagaccaattctagaattcc

SEQ ID NO: 4735 - DNA, 25 bp, Homo sapiens
gtcaaagaccaattctagaattcct

SEQ ID NO: 4736 - DNA, 25 bp, Homo sapiens
tcaaagaccaattctagaattcctg

SEQ ID NO: 4737 - DNA, 25 bp, Homo sapiens
caaagaccaattctagaattcctga

SEQ ID NO: 4738 - DNA, 25 bp, Homo sapiens
aaagaccaattctagaattcctgat

SEQ ID NO: 4739 - DNA, 25 bp, Homo sapiens
aagaccaattctagaattcctgatt

SEQ ID NO: 4740 - DNA, 25 bp, Homo sapiens
agaccaattctagaattcctgattg

SEQ ID NO: 4741 - DNA, 25 bp, Homo sapiens
gaccaattctagaattcctgattgc

SEQ ID NO: 4742 - DNA, 25 bp, Homo sapiens
accaattctagaattcctgattgcc

SEQ ID NO: 4743 - DNA, 25 bp, Homo sapiens
ccaattctagaattcctgattgccc

SEQ ID NO: 4744 - DNA, 25 bp, Homo sapiens
caattctagaattcctgattgccct

SEQ ID NO: 4745 - DNA, 25 bp, Homo sapiens
aattctagaattcctgattgcccta

SEQ ID NO: 4746 - DNA, 25 bp, Homo sapiens
attctagaattcctgattgccctat

SEQ ID NO: 4747 - DNA, 25 bp, Homo sapiens
ttctagaattcctgattgccctatt

SEQ ID NO: 4748 - DNA, 25 bp, Homo sapiens
tctagaattcctgattgccctattc

SEQ ID NO: 4749 - DNA, 25 bp, Homo sapiens
ctagaattcctgattgccctattcc

SEQ ID NO: 4750 - DNA, 25 bp, Homo sapiens
tagaattcctgattgccctattcca

SEQ ID NO: 4751 - DNA, 25 bp, Homo sapiens
agaattcctgattgccctattccaa

SEQ ID NO: 4752 - DNA, 25 bp, Homo sapiens
gaattcctgattgccctattccaat

SEQ ID NO: 4753 - DNA, 25 bp, Homo sapiens
aattcctgattgccctattccaatc

SEQ ID NO: 4754 - DNA, 25 bp, Homo sapiens
attcctgattgccctattccaatct

SEQ ID NO: 4755 - DNA, 25 bp, Homo sapiens
ttcctgattgccctattccaatctg

SEQ ID NO: 4756 - DNA, 25 bp, Homo sapiens
tcctgattgccctattccaatctga

SEQ ID NO: 4757 - DNA, 25 bp, Homo sapiens
cctgattgccctattccaatctgat

SEQ ID NO: 4758 - DNA, 25 bp, Homo sapiens
ctgattgccctattccaatctgatt

SEQ ID NO: 4759 - DNA, 25 bp, Homo sapiens
tgattgccctattccaatctgattt

SEQ ID NO: 4760 - DNA, 25 bp, Homo sapiens
gattgccctattccaatctgatttt

SEQ ID NO: 4761 - DNA, 25 bp, Homo sapiens
attgccctattccaatctgattttt

SEQ ID NO: 4762 - DNA, 25 bp, Homo sapiens
ttgccctattccaatctgatttttt

SEQ ID NO: 4763 - DNA, 25 bp, Homo sapiens
tgccctattccaatctgattttttt

SEQ ID NO: 4764 - DNA, 25 bp, Homo sapiens
gccctattccaatctgattttttta

SEQ ID NO: 4765 - DNA, 25 bp, Homo sapiens
ccctattccaatctgatttttttaa

SEQ ID NO: 4766 - DNA, 25 bp, Homo sapiens
cctattccaatctgatttttttaaa

SEQ ID NO: 4767 - DNA, 25 bp, Homo sapiens
ctattccaatctgatttttttaaat

SEQ ID NO: 4768 - DNA, 25 bp, Homo sapiens
tattccaatctgatttttttaaatg

SEQ ID NO: 4769 - DNA, 25 bp, Homo sapiens
attccaatctgatttttttaaatgc

SEQ ID NO: 4770 - DNA, 25 bp, Homo sapiens
ttccaatctgatttttttaaatgca

SEQ ID NO: 4771 - DNA, 25 bp, Homo sapiens
tccaatctgatttttttaaatgcac

SEQ ID NO: 4772 - DNA, 25 bp, Homo sapiens
ccaatctgatttttttaaatgcact

SEQ ID NO: 4773 - DNA, 25 bp, Homo sapiens
caatctgatttttttaaatgcacta

SEQ ID NO: 4774 - DNA, 25 bp, Homo sapiens
aatctgatttttttaaatgcactat

SEQ ID NO: 4775 - DNA, 25 bp, Homo sapiens
atctgatttttttaaatgcactatt

SEQ ID NO: 4776 - DNA, 25 bp, Homo sapiens
tctgatttttttaaatgcactatta

SEQ ID NO: 4777 - DNA, 25 bp, Homo sapiens
ctgatttttttaaatgcactattaa

SEQ ID NO: 4778 - DNA, 25 bp, Homo sapiens
tgatttttttaaatgcactattaag

SEQ ID NO: 4779 - DNA, 25 bp, Homo sapiens
gatttttttaaatgcactattaaga

SEQ ID NO: 4780 - DNA, 25 bp, Homo sapiens
atttttttaaatgcactattaagaa

SEQ ID NO: 4781 - DNA, 25 bp, Homo sapiens
tttttttaaatgcactattaagaat

SEQ ID NO: 4782 - DNA, 25 bp, Homo sapiens
ttttttaaatgcactattaagaata

SEQ ID NO: 4783 - DNA, 25 bp, Homo sapiens
tttttaaatgcactattaagaatag

SEQ ID NO: 4784 - DNA, 25 bp, Homo sapiens
ttttaaatgcactattaagaatagt

SEQ ID NO: 4785 - DNA, 25 bp, Homo sapiens
tttaaatgcactattaagaatagtc

SEQ ID NO: 4786 - DNA, 25 bp, Homo sapiens
ttaaatgcactattaagaatagtca

SEQ ID NO: 4787 - DNA, 25 bp, Homo sapiens
taaatgcactattaagaatagtcaa

SEQ ID NO: 4788 - DNA, 25 bp, Homo sapiens
aaatgcactattaagaatagtcaac

SEQ ID NO: 4789 - DNA, 25 bp, Homo sapiens
aatgcactattaagaatagtcaaca

SEQ ID NO: 4790 - DNA, 25 bp, Homo sapiens
atgcactattaagaatagtcaacaa

SEQ ID NO: 4791 - DNA, 25 bp, Homo sapiens
tgcactattaagaatagtcaacaaa

SEQ ID NO: 4792 - DNA, 25 bp, Homo sapiens
gcactattaagaatagtcaacaaac

SEQ ID NO: 4793 - DNA, 25 bp, Homo sapiens
cactattaagaatagtcaacaaact

SEQ ID NO: 4794 - DNA, 25 bp, Homo sapiens
actattaagaatagtcaacaaacta

SEQ ID NO: 4795 - DNA, 25 bp, Homo sapiens
ctattaagaatagtcaacaaactac

SEQ ID NO: 4796 - DNA, 2021 bp, Homo sapiens
caggaaaccgtctggtgggatctccgcagctgcttttcacctgctgttcctcctgcgcttcctaagaggaagaatcaatgccgtgggtggagcccaagcccaggccggggccggagcagaagcccaagctcaccaaaccggactctgccaccgggccgcagtggtaccaggaatctcaggaatcggagtcggaaggcaagcagccacccccgggacccctggcacccccgaaatcccccgaaccctcaggacccctggcgtcggagcaggatgcacccctgccagagggggacgatgcacccccccggccgtcgatgctggacgatgcaccccgcctgccgctggagctggacgatgcacccctgccggaggaggaaacccccgaacccacggccatctgcaggcaccggcaccgctgtcacaccgactgcctagaggggctgctgtcccgcaccttccagtggctggggtggcaggtgggcgcgcacccctggatcttcctgctggcgcccttgatgctgacagccgcgctgggcaccggcttcctgtacctacccaaggacgaagaggaagacctagaggagcattacacccctgtggggagcccggccaaggcggagcggcgcttcgtgcagggccatttcaccaccaacgactcctaccgcttctccgcctccaggaggagcaccgaagccaatttcgtctcgcttctggtggtctcctacagcgactcactgctggacccagctacctttgcagaagtcagcaaactggacggcgcggtgcaggatctgcgcgtggcgcgggaaaagggaagccagatccagtaccagcaggtgtgcgcgaggtacagggcgctctgcgtgccccccaacccgatcctgtacgcctggcaggtgaacaaaacgctcaacctgagcagcatctccttccccgcctacaaccacggcaggcatcccctctacctgaccggcttcttcggaggatacatcttggggggcagcctaggaatgggccagttactcctgcgggccaaagccatgcggctgctgtactacctgaagaccgaggaccctgagtacgacgtgcagagcaagcagtggctcacccatttgctcgatcaatttaccaacattaagaacatcttggccttgaaaaaaattgaggtagtccactttacatcgctttccagacaactggaatttgaggcaacttctgtgactgtgatccctgtgtttcacctggcatacattctcatcattctgtttgcagtcacatcatgctttaggtttgactgcatacgaaacaaaatgtgtgttgcggcctttggagtgatttctgctttcttggcagtggtgagcggctttggcctgctgttgcacattggggtgccatttgtcatcatagttgccaattcaccatttcttattctaggtgttggggtcgatgacatgtttatcatgatttctgcctggcataagaccaaccttgcagatgacatacgagagcggatgtccaatgtctattcaaaagcggcagtgtctattacaatcaccaccatcactaacatcctggccttatatacagggattatgagctcttttaggtctgtacaatgtttttgcatctatacaggaatgaccctgttattttgctatttttataacatcacgtgttttggagcatttatggccttggatggtaaaagagaagtagtctgcctatgctggttgaaaaaggctgacccaaaatggccctcatttaaaaagttctgctgtttcccatttggttctgtcccagatgaacatggaactgatatccatccaataagtttgttttttagagactattttggcccctttctcacaaggagtgagtccaagtattttgtagtctttatatatgttttgtacatcataagcagtatatatgggtgtttccatgtgcaggaaggtttagaccttcgaaatctggcaagtgacgattcctacatcacaccatattttaacgtagaggagaat

SEQ ID NO: 4797 - DNA, 77 bp, Homo sapiens; identical to SEQ ID NO: 8

SEQ ID NO: 4798 - DNA, 1944 bp, Homo sapiens
atgccgtgggtggagcccaagcccaggccggggccggagcagaagcccaagctcaccaaaccggactctgccaccgggccgcagtggtaccaggaatctcaggaatcggagtcggaaggcaagcagccacccccgggacccctggcacccccgaaatcccccgaaccctcaggacccctggcgtcggagcaggatgcacccctgccagagggggacgatgcacccccccggccgtcgatgctggacgatgcaccccgcctgccgctggagctggacgatgcacccctgccggaggaggaaacccccgaacccacggccatctgcaggcaccggcaccgctgtcacaccgactgcctagaggggctgctgtcccgcaccttccagtggctggggtggcaggtgggcgcgcacccctggatcttcctgctggcgcccttgatgctgacagccgcgctgggcaccggcttcctgtacctacccaaggacgaagaggaagacctagaggagcattacacccctgtggggagcccggccaaggcggagcggcgcttcgtgcagggccatttcaccaccaacgactcctaccgcttctccgcctccaggaggagcaccgaagccaatttcgtctcgcttctggtggtctcctacagcgactcactgctggacccagctacctttgcagaagtcagcaaactggacggcgcggtgcaggatctgcgcgtggcgcgggaaaagggaagccagatccagtaccagcaggtgtgcgcgaggtacagggcgctctgcgtgccccccaacccgatcctgtacgcctggcaggtgaacaaaacgctcaacctgagcagcatctccttccccgcctacaaccacggcaggcatcccctctacctgaccggcttcttcggaggatacatcttggggggcagcctaggaatgggccagttactcctgcgggccaaagccatgcggctgctgtactacctgaagaccgaggaccctgagtacgacgtgcagagcaagcagtggctcacccatttgctcgatcaatttaccaacattaagaacatcttggccttgaaaaaaattgaggtagtccactttacatcgctttccagacaactggaatttgaggcaacttctgtgactgtgatccctgtgtttcacctggcatacattctcatcattctgtttgcagtcacatcatgctttaggtttgactgcatacgaaacaaaatgtgtgttgcggcctttggagtgatttctgctttcttggcagtggtgagcggctttggcctgctgttgcacattggggtgccatttgtcatcatagttgccaattcaccatttcttattctaggtgttggggtcgatgacatgtttatcatgatttctgcctggcataagaccaaccttgcagatgacatacgagagcggatgtccaatgtctattcaaaagcggcagtgtctattacaatcaccaccatcactaacatcctggccttatatacagggattatgagctcttttaggtctgtacaatgtttttgcatctatacaggaatgaccctgttattttgctatttttataacatcacgtgttttggagcatttatggccttggatggtaaaagagaagtagtctgcctatgctggttgaaaaaggctgacccaaaatggccctcatttaaaaagttctgctgtttcccatttggttctgtcccagatgaacatggaactgatatccatccaataagtttgttttttagagactattttggcccctttctcacaaggagtgagtccaagtattttgtagtctttatatatgttttgtacatcataagcagtatatatgggtgtttccatgtgcaggaaggtttagaccttcgaaatctggcaagtgacgattcctacatcacaccatattttaacgtagaggagaat

SEQ ID NO: 4799 - protein, 648 aa, Homo sapiens
MPWVEPKPRPGPEQKPKLTKPDSATGPQWYQESQESESEGKQPPPGPLAPPKSPEPSGPLASEQDAPLPEGDDAPPRPSMLDDAPRLPLELDDAPLPEEETPEPTAICRHRHRCHTDCLEGLLSRTFQWLGWQVGAHPWIFLLAPLMLTAALGTGFLYLPKDEEEDLEEHYTPVGSPAKAERRFVQGHFTTNDSYRFSASRRSTEANFVSLLVVSYSDSLLDPATFAEVSKLDGAVQDLRVAREKGSQIQYQQVCARYRALCVPPNPILYAWQVNKTLNLSSISFPAYNHGRHPLYLTGFFGGYILGGSLGMGQLLLRAKAMRLLYYLKTEDPEYDVQSKQWLTHLLDQFTNIKNILALKKIEVVHFTSLSRQLEFEATSVTVIPVFHLAYILIILFAVTSCFRFDCIRNKMCVAAFGVISAFLAVVSGFGLLLHIGVPFVIIVANSPFLILGVGVDDMFIMISAWHKTNLADDIRERMSNVYSKAAVSITITTITNILALYTGIMSSFRSVQCFCIYTGMTLLFCYFYNITCFGAFMALDGKREVVCLCWLKKADPKWPSFKKFCCFPFGSVPDEHGTDIHPISLFFRDYFGPFLTRSESKYFVVFIYVLYIISSIYGCFHVQEGLDLRNLASDDSYITPYFNVEEN

SEQ ID NO: 4800 - DNA, 405 bp, Homo sapiens
tccatgattaatcttgtcatttgtatagggttttctttcgatttttctgtacacatttcctatgcatttgtttctagttctcaaccctcagtaaaccaaaaatcagttgaggcattgtatcttctaggctacccagtgttacaaagtgcaatttcaacaataataggggtgtgtgttttagctgcagcgaaagcatacatcttcagaacattttttaagattatgtttcttgttatgatatttggggcagctcatggcctaatttttattccagtattcttaaccttttttggaaggtttatttgaatatccactaacaagtcaaagaccaattctagaattcctgattgccctattccaatctgatttttttaaatgcactattaagaatagtcaacaaactac

SEQ ID NO: 4801 - DNA, 24 bp, Homo sapiens
caggaaaccgtctggtgggatctc

SEQ ID NO: 4802 - DNA, 27 bp, Homo sapiens
ctgagacggagtctcattcttgtcacc

SEQ ID NO: 4803 - DNA, 22 bp, Homo sapiens
acatacgagagcggatgtccaa

SEQ ID NO: 4804 - DNA, 22 bp, Homo sapiens
gggacagaaccaaatgggaaac

SEQ ID NO: 4805 - protein, 821 aa, Artificial Sequence
  Consensus sequence of Patched motif
VLSSKIRYTFTPDDIRSYTERGSRSEHEPLVERKFFPGDGYPISRFSIITAKARNSNILDIRYLNEVVQVNDFISTNVTIPVSGITLSFKDLCMRFCDINCPVNQHYNGQILRSNLHNSRIDLTYPTMTFFGTKIYLGPNFGGVKLDPNPGNIKSVKAIVLYYRLKRDPEEVEEDSKEWELSLFDYLENEYASDHIQVTIFSDQVLEDELVRNGLTLTPFFVVGFAILVTFSILTSVRLASGSLHIDWVRSKPILAILGVLTPLMAIVSAFGLLFWLGFRFNSIVCVMPFLVLAIGVDDMFLMVHAWQRTTRSLSVKKRMGEVLEEAGPSITITSLTNVLSFGIGAITPTPEIQLFCIYTAVAIFFDFIYQLTFFAAIMAIAGKYEMKGRHSLFLRAVDAAETESPQRLDSRGSAKSSKSHEAEQAVVKFFLNIYCPFLLNPKVRVCVLLVYLVYLAIAIYGCTNMKEGLDPAKLFLKDSPLVEYLRLREKHVWPYGLQVTVFVNNPPDLTNPENRDRLNEMVDEFENTPYAMGKNSTKFWLRDYENFLYSFISELEDEEEEWFYDLLEWFLKSPGFSHWVGDLVWDNKTDYETTIVKKFRFTTGGKDLSTWTDRTRLLKTWRGVADEYPDFNVTVFDEDAFFLDQILSIGPTTIQSIIWTLICMAVVCFLFIPNPNTVFVITVSIASIDIGVFGFLSLWGVDLDPISMITIIMSIGFSVDFSAHIAYHFYRSHGSETPDERLADALEALGWPVIQAALSTILCVLPLLFVPSYMVVVFFKTIFLVVVIGLLHGLIFLPIILSLFVTIRTSNAKIKKPSSI

SEQ ID NO: 4806 - protein, 793 aa, Homo sapiens
  Sequence of the HTPL-L Patched motif
DEEEDLEEHYTPVGSPAKAERRFVQGHFTTNDSYRFSASRRSTEANFVSLLVVSYSDSLLDPATFAEVSKLDGAVQDLRVAREKGSQIQYQQVCARYRALCVPPNPILYAWQVNKTLNLSSISFPAYNHGRHPLYLTGFFGGYILGGSLGMGQLLLRAKAMRLLYYLKTEDPEYDVQSKQWLTHLLDQFTNIKNILALKKIEVVHFTSLSRQLEFEATSVTVIPVFHLAYILIILFAVTSCFRFDCIRNKMCVAAFGVISAFLAVVSGFGLLLHIGVPFVIIVANSPFLILGVGVDDMFIMISAWHKTNLAGDIRERMSNVYSKAAVSITITTITNILALYTGIMSSFRSVQCFCIYTGTTLLFCYFYNITCFGAFMALDGKREVVCLCWLKKADPKWPSFKKFCCFPFGSVPDEHGTDIHPMSLFFRDYFGPFLTRSESKYFVVFIYVLYIISSIYGCFHVQEGLDLRNLASDDSYITPYFNVEENYFSDYGPRVMVIVTKKVDYWDKDVRQKLENCTKIFEKNVYVDKNLTEFWLDAYVQYLKGNSQDPNEKNTFMNNIPDFLSNFPNFQHDINISSSNEIISSRGFIQTTDVSSSAKKKILLFQLRRIAEDCQIPLMVYNQAFIYFDQYAAILEDTVRNVLVASAAMFIVSLLLIPYPLCSLWVTFAIGSVIVGVTGFMAFWKVNLDSISMINLVICTGFSFDFSAHISYAFVSSSQPSVNQKSVEALYLLGYPVLQSAISTIIGVCVLAAAKAYIFRTFFKIMFLVMIFGAAHGLIFIPVFLTFFGRFI

SEQ ID NO: 4807 - protein, 836 aa, Caenorhabditis elegans
  Sequence of the Patched motif of gi 1825729
NPLSDAVYLFTPLGAQSKMERMSIHEKWPLTDNNYIPGRAVTQSREIQVTALARNDSNILDPKFANAVYQLDKYIQTRVRVLHNGHYYSYKNLCLQYKNGGCPSNKHVHILSDLHNHGFNITYPYFRFGSEGGYIGSSLGGVTVMKGENETDILASAKAWFMIYHLKFHPEEMSYISGEWELELGRMLTQYPEDPYISITYFHSQTLADELKRNADTLIPRFIISITLLIVFSTLCSLSFIDGSFSIDWVLSKPILSILGVVSAGIAILTGVGFLSLMGMPYNDIVGVMPFLVLAVGVDNMFLMVAAVRRTSRTHTVHERMGECLADAAVSILITSSTDVLSFGVGAITTIPAVQIFCVYTGVAIFFAFIYQITFFAACLALAMKHEASGRNSLFLIEAVSAEKKTSLSTFQRLFNLGSVPDHSASHDVKQPLTSRFFGEWYAPVLMHPVVRGIAMVWFVIYLLGASYGCSRIKEGLEPVNLLVEDSYAIPHYRLLEKYFWKYGQQVQIVINNAPDLRNHTSRDRVHAMVLDFATSKHAIGMESVQFWLFEMERYYQKELEVQIIDSSFYGLLHHFLASKTNNPLAEDIYWGPMPDDDNGTMVKSFRFILGMKDLVTTMDQTDATMSFREVAARWPEFNVTTFMPIWMFTDQYIIIIPNTVQNIIIALLVMIVIAVLFIPQPMCSLWVALACASIDFGVIGYMTLWGVNLDAISMITIIMSIGFSVDYSAHIAYGYVVSREDTAAGRVKEALSALGWPLSQGAMSTIIAVSVLADIPAYMIVTFFKTVVLSISLGLLHGLVFLPVLLSIFVRGCCIIPSSPHGHPSAQKIEKQIRI

SEQ ID NO: 4808 - protein, 846 aa, Caenorhabditis elegans
  Sequence of the Patched motif of gi 1707052
NVVYSLLMIFGPYSYTERRIIHDAWPLVDGTFVAGRAVTQSREVQVAVVARSGGNILDRVFSNELKLMESFIRNNITVQFSNRTWSFADLCLAGPDGRCANNDHIQLASRLHQHGINITYPTVRLSDKSAYIASALGGVKLAKGDNGENIIVEATAWLLIYQLKFYPNEISYVSGLWEREFKNKMDEYKKQAKYISITYFHSQTLSDELNRNAERLAPKFIGAFVILVCFSVLCSIVTIKGSGYIDWVVTKPILSVLGVSNAGMGIASAMGMLTYLEIQYNDIIAVMPFLVVAVGTDNMFLMVASLKRTDRNLKYDQRIAECMADAAVSILITALTDALSFGVGTITTIPAVQIFCIYTMCALLLTFAYQLTFFCAILVYYTRIEEQGLHSIWLRPAVTYSSTSPLNVKLFWLGSQPQKPLPSCGTVSSTSSVSTMTSQATSPASKHLHHCAATSFFRNWYAPVLMQPWIRAIAGLWYLIYLGISIYGCTHLKEGLEPANLLVDDSYATPHYRVLEKHYWHYGASLQIVVSNPPDLRDPVERINMDKMASTFANCKVAIGDDSVQFWLREMQVSEEIHKIQYDNEKFYDHAAQYIYSDMSQPWVVDVVWGRNNNSERIIKTFRFMIGMRDISTTTKQTEATNTFREIASRFEQYNVTTYMPLWLFTDQYALVVPNTMQDIIVAVACMLVISALLIPQPVCSFWVAVTIGSIDLGVLGFMTLWNVNLDAISMITIIMSVGFSVDYSAHITYAYVISKESTTSARVCDALGDLGWPVAQGAMSTILAVSVLSDVPAYMIVTFFKTVFLAISIGFLHGLVFLPLMLSVFVGKIFDIHISNISIKYCIYL

SEQ ID NO: 4809 - protein, 906 aa, Caenorhabditis elegans
  Sequence of the Patched motif of gi 3892144
LRVDDPSYVFTPSDARWRREISVFNENWPLDENKFLPGKSFEAKRFVNILIRAKDGGSIMRDNVLHEIEILNQWIMNNISIPTDDLKFNLTYQDLCLSYDWVCGANEHIQMLLRRNDVNQILDLHFPRGGTKDTPVYLGGIFGDVQFFQNGTLSDAKLTQLFYFLKQDQKMVEEYSSKFSYALETFLNQVYSSDVITLSFAHYQSLEDGLDENAKAFVPNFVVSFFVLAMYALVSSFTLKSSSATKIDWISSKPWLAAAGMFSTVLSIISAFGFLFILGVRYNVINTIIPFLIIGEFQSFKNMEKNQIPAIGIDDMFLMNACWDQTSKSLSVPERMSKTLSHAGVAVTITNVTDVMSFAIGCITDLPGIQFFCIYACVSVAFSYFYQLTFFSGAMAIMGEVEREKRHCLFFYRTFQLVDISKMNEEADSKLQQIKSRSASPAPFNYLSSSNSSFSSDSDSFSSKKTIPAEFAWKEQQSPNSSLSKKSKDREEKDRIVHFIGKIYGPFILSNSVRIFSGLIFVVYLAIAMYGCYNFREGLNPGNLVTNDHYIAKYFSDIKHFWRIGAQLHVAVLNPPNLTISENRNELLKVVSAFENTQYTLGREGTVFFLLEYLNYLSELNAEVEDTERLWKTKLNSWLKYTGGSTQWASNLKINKTDGSFQAFRFQIALKNFVEPNDHKHAAQLLRDIADHQPFNVVVYHEVSFGNRKILNDFISSHSCYAQKNIPKLAFPFADQYLIILPATIQNVVISLLCMAVVSFLLVPSLPSGFVIFVSIVSINIGVFGYMTLWGVNLDAVSMISIIMSIGFAVDLSAHIIYAFVTSHGDTKQRVIGALETLGWPIFQGASSTIAGISILYTVDAYIILVFFKTIWLTMLIGAIHGLFFIPIFLSLFPVEFFRIPKSSEL

1. An isolated nucleic acid that encodes a Patched like transmembrane protein, functioning in male germ cell development, and as a potential tumor suppressor, comprising:
(a) a nucleotide sequence selected from the group consisting of:
(i) SEQ ID NO: 1, SEQ ID NO: 4;
(ii) the complement of the sequences set forth in (i);
(iii) the nucleotide sequence of SEQ ID NO: 2, SEQ ID NO: 5;
(iv) a degenerate variant of the sequences set forth in (iii); and
(v) the complement of the sequences set forth in (iii) and (iv); or
(b) a nucleotide sequence selected from the group consisting of:
(i) a nucleotide sequence that encodes a polypeptide having the sequence of SEQ ID NO: 3, SEQ ID NO: 6;
(ii) a nucleotide sequence that encodes a polypeptide having the sequence of SEQ ID NO: 3, SEQ ID NO: 6, with conservative amino acid substitutions; and
(iii) the complement of the sequences set forth in (i) and (ii),
wherein said isolated nucleic acid comprising a nucleotide sequence selected from group (b) is no more than about 100 kb in length.

2. The isolated nucleic acid of claim 1 wherein said nucleic acid, or the complement of said nucleic acid, encodes a polypeptide having a role in male germ cell development, or is a potential tumor suppressor.

3. The isolated nucleic acid of claim 1, wherein said nucleic acid, or the complement of said nucleic acid, is expressed in testis, as well as in adrenal, adult and fetal liver, bone marrow, brain, kidney, lung, placenta, prostate, skeletal muscle or colon.

4. A nucleic acid probe, comprising:
(a) the nucleic acid of claim 1; or
(b) at least 17 contiguous nucleotides of SEQ ID NO: 7, SEQ ID NO: 11, SEQ ID NO: 4796, SEQ ID NO: 4800,
wherein said probe according to (b) is no longer than about 100 kb in length.

5. The probe of claim 4, wherein said probe is detectably labeled.

6. The probe of claim 4, attached to a substrate.

7. A microarray, wherein at least one probe of said array is a probe according to claim 4.

8. The isolated nucleic acid molecule of claim 1, wherein said nucleic acid molecule is operably linked to one or more expression control elements.

9. A replicable vector comprising a nucleic acid molecule of claim 1.

10. A replicable vector comprising an isolated nucleic acid molecule of claim 8.

11. A host cell transformed to contain the nucleic acid molecule of any one of claims 1 or 8-10, or the progeny thereof.

12. A method for producing a polypeptide, the method comprising:
culturing the host cell of claim 11 under conditions in which the protein encoded by said nucleic acid molecule is expressed.

13. An isolated polypeptide produced by the method of claim 12.

14. An isolated polypeptide, comprising:
(a) an amino acid sequence from SEQ ID NO: 3, SEQ ID NO: 6;
(b) an amino acid sequence having at least 65% amino acid sequence identity to that of (a);
(c) an amino acid sequence according to (a) in which at least 95% of deviations from the sequence of (a) are conservative substitutions; or
(d) a fragment of at least 8 contiguous amino acids of any of (a)-(c).

15. A fusion protein, said fusion protein comprising a polypeptide of claim 14 fused to a heterologous amino acid sequence.

16. The fusion protein of claim 15, wherein said heterologous amino acid sequence is a detectable moiety.

17. The fusion protein of claim 16, wherein said detectable moiety is fluorescent.

18. The fusion protein of claim 15, wherein said heterologous amino acid sequence is an Ig Fc region.

19. An isolated antibody, or antigen-binding fragment or derivative thereof, the binding of which can be competitively inhibited by a polypeptide of claim 14.

20. A transgenic non-human animal modified to contain the nucleic acid molecule of any one of claims 1 or 8-10.

21. A transgenic non-human animal unable to express the endogenous orthologue of the nucleic acid molecule of claim 1.

22. A method of identifying agents that modulate the expression of HTPL, the method comprising:
contacting a cell or tissue sample believed to express HTPL with a chemical or biological agent, and then
comparing the amount of HTPL expression in said cell or tissue sample with that of a control,
changes in the amount relative to control identifying an agent that modulates expression of HTPL.

23. A method of identifying agonists and antagonists of HTPL, the method comprising:
contacting a cell or tissue sample believed to express HTPL with a chemical or biological agent, and then
comparing the activity of HTPL with that of a control,
increased activity relative to a control identifying an agonist, decreased activity relative to a control identifying an antagonist.

24. A purified agonist of the polypeptide of claim 14.

25. A purified antagonist of the polypeptide of claim 14.

26. A method of identifying a specific binding partner for a polypeptide according to claim 14, the method comprising:
contacting said polypeptide to a potential binding partner; and
determining if the potential binding partner binds to said polypeptide.

27. The method of claim 26, wherein said contacting is performed in vivo.

28. A purified binding partner of the polypeptide of claim 14.

29. A method for detecting a target nucleic acid in a sample, said target being a nucleic acid according to claim 1, the method comprising:
(a) hybridizing the sample with a probe comprising at least 17 contiguous nucleotides of a sequence complementary to said target nucleic acid in said sample under high stringency hybridization conditions, and
(b) detecting the presence or absence, and optionally the amount, of said binding.

30. A method of diagnosing a disease caused by mutation in HTPL, comprising:
detecting said mutation in a sample of nucleic acids that derives from a subject suspected to have said disease.

31. A method of diagnosing or monitoring a disease caused by altered expression of HTPL, comprising:
determining the level of expression of HTPL in a sample of nucleic acids or proteins that derives from a subject suspected to have said disease,
alterations from a normal level of expression providing diagnostic and/or monitoring information.

32. A diagnostic composition comprising the nucleic acid of claim 1, said nucleic acid being detectably labeled.

33. The diagnostic composition of claim 32, wherein said composition is further suitable for in vivo administration.

34. A diagnostic composition comprising the polypeptide of claim 14, said polypeptide being detectably labeled.

35. The diagnostic composition of claim 34, wherein said composition is further suitable for in vivo administration.

36. A diagnostic composition comprising the antibody, or antigen-binding fragment or derivative thereof, of claim 19.

37. The diagnostic composition of claim 36, wherein said antibody or antigen-binding fragment or derivative thereof is detectably labeled.

38. The diagnostic composition of claim 37, wherein said composition is further suitable for in vivo administration.

39. A pharmaceutical composition comprising the nucleic acid of claim 1 and a pharmaceutically acceptable excipient.

40. A pharmaceutical composition comprising the polypeptide of claim 14 and a pharmaceutically acceptable excipient.

41. A pharmaceutical composition comprising the antibody or antigen-binding fragment or derivative thereof of claim 19 and a pharmaceutically acceptable excipient.

42. A pharmaceutical composition comprising the agonist of claim 24 and a pharmaceutically acceptable excipient.

43. A pharmaceutical composition comprising the antagonist of claim 25 and a pharmaceutically acceptable excipient.

44. A method for treating or preventing a disorder associated with decreased expression or activity of HTPL, the method comprising administering to a subject in need of such treatment an effective amount of the pharmaceutical composition of any of claims 39, 40 or 42.

45. A method for treating or preventing a disorder associated with increased expression or activity of HTPL, the method comprising administering to a subject in need of such treatment an effective amount of the pharmaceutical composition of claim 41 or 43.

46. A method of modulating the expression of a nucleic acid according to claim 1, the method comprising:
administering an effective amount of an agent which modulates the expression of a nucleic acid according to claim 1.

47. A method of modulating at least one activity of a polypeptide according to claim 14, the method comprising:
administering an effective amount of an agent which modulates at least one activity of a polypeptide according to claim 14.

48. An isolated nucleic acid, comprising:
(a) a nucleotide sequence selected from the group consisting of:
(i) SEQ ID NO: 1;
(ii) SEQ ID NO: 2;
(iii) a degenerate variant of the sequence set forth in (ii); and
(iv) the complement of the entire sequences set forth in (i) to (iii); or
(b) a nucleotide sequence selected from the group consisting of:
(i) a nucleotide sequence that encodes a polypeptide having the sequence of SEQ ID NO: 3; and
(iii) a nucleotide sequence that is the complement of the entire nucleotide sequence of (i),
wherein said isolated nucleic acid encodes a Patched like transmembrane protein, functioning in male germ cell development, or as a tumor suppressor and wherein said isolated nucleic acid comprising a nucleotide sequence selected from group (b) is no more than about 100 kb in length.

49. The isolated nucleic acid of claim 48 wherein said nucleic acid, or the complement of said nucleic acid, encodes a polypeptide having a role in male germ cell development, or is a tumor suppressor.

50. The isolated nucleic acid of claim 48, wherein said nucleic acid, or the complement of said nucleic acid, is expressed in testis, as well as in adrenal, adult and fetal liver, bone marrow, brain, kidney, lung, placenta, prostate, skeletal muscle or colon.

51. A nucleic acid probe, comprising the nucleic acid of claim 48.

52. The probe of claim 51, wherein said probe is detectably labeled.

53. The probe of claim 51, attached to a substrate.

54. The isolated nucleic acid molecule of claim 48, wherein said nucleic acid molecule is operably linked to one or more expression control elements.

55. A replicable vector comprising a nucleic acid molecule of claim 48.

56. A replicable vector comprising an isolated nucleic acid molecule of claim 54.

57. A host cell transformed to contain the nucleic acid molecule of any one of claims 48 or 54-56, or the progeny thereof.

58. A diagnostic composition comprising the nucleic acid of claim 48, said nucleic acid being detectably labeled.

59. The diagnostic composition of claim 58, wherein said composition is further suitable for in vivo administration.

60. A pharmaceutical composition comprising the nucleic acid of claim 48 and a pharmaceutically acceptable excipient.

61. An isolated nucleic acid, comprising a nucleotide sequence selected from the group consisting of:
(i) a nucleotide sequence at least 95% identical in sequence to SEQ ID NO: 2;
(ii) a nucleotide sequence that encodes a polypeptide at least 95% identical in sequence to SEQ ID NO: 3; and
(iii) a nucleotide sequence that is the complement of the entire nucleotide sequences of any of (i)-(ii),
wherein said isolated nucleic acid encodes a Patched like transmembrane protein, functioning in male germ cell development, or as a tumor suppressor.

62. An isolated nucleic acid, comprising a nucleotide sequence selected from the group consisting of:
(i) a nucleotide sequence at least 99% identical in sequence to SEQ ID NO: 2;
(ii) a nucleotide sequence that encodes a polypeptide at least 99% identical in sequence to SEQ ID NO: 3; and
(iii) a nucleotide sequence that is the complement of the entire nucleotide sequences of any of (i)-(ii),
wherein said isolated nucleic acid encodes a Patched like transmembrane protein, functioning in male germ cell development, or as a tumor suppressor.
